(19) United States
(12) Patent Application Publication
(10) Pub. No.: US 2004/0234973 A1
(43) Pub. Date: Nov. 25, 2004

(54) Methods and nucleic acids for the analysis of hematopoietic cell proliferative disorders

(76) Inventors: Peter Adorjan, Berlin (DE); Ralf Lesche, Berlin (DE); Evelyne Lipscher, Berlin (DE); Sabine Maier, Berlin (DE); Fabian Model, Berlin (DE); Inko Nimmrich, Berlin (DE)

Correspondence Address: Kriegsman & Kriegsman, 665 Franklin Street, Framingham, MA, 01702, US

(21) Appl. No.: 10/473,126

(22) PCT Filed: Mar. 26, 2002
(86) PCT No.: PCT/EP02/03401

Related U.S. Application Data
(60) Provisional application No. 60/278,333, filed on Mar. 26, 2001.

(51) Int. Cl. C12Q 1/68; C12N 5/08

(52) U.S. Cl. 435/6; 435/372

(57) ABSTRACT

The present invention relates to modified and genomic sequences, to oligonucleotides and/or PNA-oligomers for detecting the cytosine methylation state of genomic DNA, as well as to a method for ascertaining genetic and/or epigenetic parameters of genes for use in the differentiation, diagnosis, treatment and/or monitoring of hematopoietic cell proliferative disorders, or the predisposition to hematopoietic cell proliferative disorders.

### FIELD OF THE INVENTION

[0001] Class prediction is of crucial importance for most therapeutic decisions in cancer, therefore prediction of tumour class is one of the most important problems in diagnostic oncology. Different classes and sub-classes of cancers respond differently to specific types of treatment. Vital therapeutic decisions such as which therapeutic regimen is used are therefore crucially dependent on the precise recognition of tumour class. Currently tumour classification generally depends on morphological, histopathological or immunological parameters, and single molecular markers (R. W. McKenna, Clin Chem. 46, 1252 (2000); F. R. Appelbaum, Semin Hematol. 36, 401 (1999)). However, none of the diagnostic procedures currently in use is sufficient to classify tumours correctly. Different methods have to be combined, and correct classification of a tumour depends on the experience of individual pathologists.

[0002] Recently, several groups have shown that precise determination of tumour class can be achieved by microarray-based expression analysis. Golub and coworkers screened the expression levels of almost 7000 genes, between 10 and 100 of which were then shown to be sufficient to distinguish between acute lymphoblastic leukaemia (ALL) and acute myeloid leukaemia (AML) (T. R. Golub et al., Science 286, 531 (1999)). In a similar approach, Alizadeh and coworkers discovered yet unknown subclasses of diffuse large B-cell lymphoma with significant differences regarding response to therapy and disease outcome (A. A. Alizadeh et al., Nature 403, 503 (2000)). Also, it was shown that global transcript analysis can predict phenotypic characteristics of malignant melanoma (M. Bittner et al., Nature 406, 535 (2000)).

[0003] Large scale analysis using mRNA based microarrays are primarily impeded by the instability of mRNA (T. Emmert-Buck et al., Am J Pathol. 156, 1109 (2000)). Also expression changes of only a minimum of a factor 2 can be routinely and reliably detected (R. J. Lipshutz, S. P. A Fodor, T. R. Gingeras, D. J. Lockhart, Nature Genetics 21, 20 (1999); D. W. Selinger, K. J. Cheung, R. Mei, E. M. Johansson, C. S. Richmond, Nature Biotechnology 18, 1262 (2000)). Furthermore, sample preparation is complicated by the fact that expression changes occur within minutes following certain triggers. The inability to resolve the individual contributions of such influences on an expression profile, and difficulties with quantifying the gradual nature of the occurring changes complicates data analysis.

[0004] Aberrant DNA methylation within CpG islands is common in human malignancies leading to abrogation or overexpression of a broad spectrum of genes (P. A. Jones, Cancer Res 65, 2463 (1996)). Abnormal methylation has also been shown to occur in CpG rich regulatory elements in intronic and coding parts of genes for certain tumours (M. F. Chan, G. Liang, P. A. Jones, Curr Top Microbiol Immunol 249, 75(2000)). Using restriction landmark genomic scanning, Costello and coworkers were able to show that methylation patterns are tumour-type specific (J. F. Costello et al., Nat Genet 24, 132 (2000)). Highly characteristic DNA methylation patterns could also be shown for breast cancer cell lines (T. H.-M. Huang, M. R. Perry, D. E. Laux, Hum Mol Genet 8, 459 (1999)). As does large scale mRNA expression monitoring, genome wide assessment of methylation status represents a molecular fingerprint of cancer tissues and therefore should allow tumour class prediction and discovery.

[0005] Leukemia is a malignant disease that originates in a cell in the marrow, and is characterized by the uncontrolled proliferation of developing marrow cells. The majority of leukemias are classified according to the cell type from which they develop, as either myelogenous or lymphocytic. Both classes may be acute or chronic. Acute leukemia is a rapidly progressing disease that results in the accumulation of immature, functionless cells in the marrow and blood. In many cases the marrow can no longer produce sufficient quantities of normal red and white blood cells and platelets. Anemia, a deficiency of red cells, develops in virtually all leukemia patients. The lack of normal white cells impairs the body's ability to fight infections. A shortage of platelets results in bruising and easy bleeding. Chronic leukemia progresses more slowly and permits greater numbers of more mature, functional cells to be made.

[0006] Among an estimated 31,500 new cases of leukemia in the United States in 2001, about equal proportions are acute leukemia and chronic types. Most cases occur in older adults; more than half of all cases occur after age 60. Leukemia usually strikes ten times as many adults as children. Leukemia is the most common childhood cancer and acute lymphocytic leukemia (hereinafter also referred to by the abbreviation ALL) accounts for 80 percent of the childhood leukemia cases. The most common types of leukemia in adults are acute myelogenous leukemia hereinafter also referred to by the abbreviation AML), with an estimated 10,000 new cases annually. Acute lymphocytic leukemia will account for about 3,500 cases this year.

[0007] In additon to environmental and viral causes a variety of genes involved in cellular pathways such as cell signalling, apoptosis, cell proliferation, and senescence are thought to be involved in the development of leukemia Examples of such genes in Bc12, ALL1,

[0008] 5-methylcytosine is the most frequent covalent base modification in the DNA of eukaryotic cells. It plays a role, for example, in the regulation of the transcription, in genetic imprinting, and in tumorigenesis. Therefore, the identification of 5-methylcytosine as a component of genetic information is of considerable interest. However, 5-methylcytosine positions cannot be identified by sequencing since 5-methylcytosine has the same base pairing behavior as cytosine. Moreover, the epigenetic information carried by 5-methylcytosine is completely lost during PCR amplification.

[0009] A relatively new and currently the most frequently used method for analyzing DNA for 5-methylcytosine is based upon the specific reaction of bisulfite with cytosine which, upon subsequent alkaline hydrolysis, is converted to uracil which corresponds to thymidine in its base pairing behavior. However, 5-methylcytosine remains unmodified under these conditions. Consequently, the original DNA is converted in such a manner that methylcytosine, which originally could not be distinguished from cytosine by its hybridization behavior, can now be detected as the only remaining cytosine using “normal” molecular biological techniques, for example, by amplification and hybridization or sequencing. All of these techniques are based on base pairing which can now be fully exploited. In terms of sensitivity, the prior art is defined by a method which encloses the DNA to be analyzed in an agarose matrix, thus preventing the diffusion and renaturation of the DNA (bisulfite only reacts with single-stranded DNA), and which replaces all precipitation and purification steps with fast dialysis (Olek A, Oswald J, Walter J. A modified and improved method for bisulphite based cytosine methylation analysis. Nucleic Acids Res. 1996 Dec. 15;24(24):5064-6). Using this method, it is possible to analyze individual cells, which illustrates the potential of the method. However, currently only individual regions of a length of up to approximately 3000 base pairs are analyzed, a global analysis of cells for thousands of possible methylation events is not possible. However, this method cannot reliably analyze very small fragments from small sample quantities either. These are lost through the matrix in spite of the diffusion protection.

[0010] An overview of the further known methods of detecting 5-methylcytosine may be gathered from the following review article: Rein, T., DePamphilis, M. L., Zorbas, H., Nucleic Acids Res. 1998, 26, 2255.

[0011] To date, barring few exceptions (e.g., Zeschnigk M, Lich C, Buiting K, Doerfier W, Horsthemke B. A single-tube PCR test for the diagnosis of Angelman and Prader-Willi syndrome based on allelic methylation differences at the SNRPN locus. Eur J Hum Genet. 1997 March-April;5(2):94-8) the bisulfite technique is only used in research. Always, however, short, specific fragments of a known gene are amplified subsequent to a bisulfite treatment and either completely sequenced (Olek A, Walter J. The pre-implantation ontogeny of the H19 methylation imprint. Nat Genet. 1997 November;17(3):275-6) or individual cytosine positions are detected by a primer extension reaction (Gonzalgo M L, Jones P A. Rapid quantitation of methylation differences at specific sites using methylation-sensitive single nucleotide primer extension (Ms-SNuPE). Nucleic Acids Res. 1997 Jun. 15;25(12):2529-31, WO Patent 9500669) or by enzymatic digestion (Xiong Z, Laird P W. COBRA: a sensitive and quantitative DNA methylation assay. Nucleic Acids Res. 1997 Jun. 15;25(12):2532-4). In addition, detection by hybridization has also been described (Olek et al., WO 99 28498).

[0012] Further publications dealing with the use of the bisulfite technique for methylation detection in individual genes are: Grigg G, Clark S. Sequencing 5-methylcytosine residues in genomic DNA. Bioessays. 1994 June; 16(6):431-6, 431; Zeschnigk M, Schmitz B, Dittrich B, Buiting K, Horsthemke B, Doerfler W. Imprinted segments in the human genome: different DNA methylation patterns in the Prader-Willi/Angelman syndrome region as determined by the genomic sequencing method. Hum Mol Genet. 1997 March;6(3):387-95; Feil R, Charlton J, Bird A P, Walter J, Reik W. Methylation analysis on individual chromosomes: improved protocol for bisulphite genomic sequencing. Nucleic Acids Res. 1994 Feb. 25;22(4):695-6; Martin V, Ribieras S, Song-Wang X, Rio M C, Dante R. Genomic sequencing indicates a correlation between DNA hypomethylation in the 5′ region of the pS2 gene and its expression in human breast cancer cell lines. Gene. 1995 May 19;157(1-2):2614; WO 97 46705, WO 95 15373 and WO 45560.

[0013] An overview of the Prior Art in oligomer array manufacturing can be gathered from a special edition of Nature Genetics (Nature Genetics Supplement, Volume 21, January 1999), published in January 1999, and from the literature cited therein.

[0014] Fluorescently labeled probes are often used for the scanning of immobilized DNA arrays. The simple attachment of Cy3 and Cy5 dyes to the 5′-OH of the specific probe are particularly suitable for fluorescence labels. The detection of the fluorescence of the hybridized probes may be carried out, for example via a confocal microscope. Cy3 and Cy5 dyes, besides many others, are commercially available.

[0015] Matrix Assisted Laser Desorption Ionization Mass Spectrometry (MALDI-TOF) is a very efficient development for the analysis of biomolecules (Karas M, Hillenkamp F. Laser desorption ionization of proteins with molecular masses exceeding 10,000 daltons. Anal Chem. 1988 Oct. 15;60(20):2299-301). An analyte is embedded in a light-absorbing matrix. The matrix is evaporated by a short laser pulse thus transporting the analyte molecule into the vapor phase in an unfragmented manner. The analyte is ionized by collisions with matrix molecules. An applied voltage accelerates the ions into a field-free flight tube. Due to their different masses, the ions are accelerated at different rates. Smaller ions reach the detector sooner than bigger ones.

[0016] MALDI-TOF spectrometry is excellently suited to the analysis of peptides and proteins. The analysis of nucleic acids is somewhat more difficult (Gut I G, Beck S. DNA and Matrix Assisted Laser Desorption Ionization Mass Spectrometry. Current Innovations and Future Trends. 1995, 1; 147-57). The sensitivity to nucleic acids is approximately 100 times worse than to peptides and decreases disproportionally with increasing fragment size. For nucleic acids having a multiply negatively charged backbone, the ionization process via the matrix is considerably less efficient. In MALDI-TOF spectrometry, the selection of the matrix plays an eminently important role. For the desorption of peptides, several very efficient matrixes have been found which produce a very fine crystallization. There are now several responsive matrixes for DNA, however, the difference in sensitivity has not been reduced. The difference in sensitivity can be reduced by chemically modifying the DNA in such a manner that it becomes more similar to a peptide. Phosphorothioate nucleic acids in which the usual phosphates of the backbone are substituted with thiophosphates can be converted into a charge-neutral DNA using simple alkylation chemistry (Gut I G, Beck S. A procedure for selective DNA alkylation and detection by mass spectrometry. Nucleic Acids Res. 1995 Apr. 25;23(8):1367-73). The coupling of a charge tag to this modified DNA results in an increase in sensitivity to the same level as that found for peptides. A further advantage of charge tagging is the increased stability of the analysis against impurities which make the detection of unmodified substrates considerably more difficult.

[0017] Genomic DNA is obtained from DNA of cell, tissue or other test samples using standard methods. This standard methodology is found in references such as Fritsch and Maniatis eds., Molecular Cloning: A Laboratory Manual, 1989.

[0018] The method according to the invention presents a novel microarray-based assay which is suited for methylation analysis of very large numbers of genes and CpG dinucleotides in parallel. Samples obtained from patients with acute lymphoblastic leukemia (ALL) or acute myeloid leukemia (AML) can be classified based solely on DNA methylation patterns.

### DESCRIPTION

[0019] The invention provide a method for the analysis of biological samples for features associated with the development of hematopoietic cell proliferative disorders, characterised in that the nucleic acid of at least one member of the group comprising the genes: ABL1, ABL1, APAF1, APC, AR, ARHI, BAK1, BAX, BCL2, CASP10, CASP8, CASP9, CCND2, CDC2, CDC25A, CDH1, CDH3, CDK 4, CDKN1A, CDKN1B (p27 Kip1), CDKN1C, CDKN2a, CDKN2B, CSNK2B, DAPK1, EGR4, ELK1, ESR1, FOS, GPIb beta, GPR37, GSK3β, GSTP1, HIC-1, HOXA5, IGF2, MDR1, MGMT, MLH1, MOS, Humos, MPL, MYC, MYCL1, MYOD1, N33, PITX2, PML, PMS2, PRAME, PTEN, RB1, RBL2, SDC4, SFN, TCL1A, TGFBR2, TP73, WT1, N-MYC, L-MYC, C-ABL, ELK1, Tubulin, CSF1, CD1R3, CSNK2B, Me491/TD63, AR, CDK 4, Humos, CDC25A, CMYCex3 is/are contacted with a reagent or series of reagents capable of distinguishing between methylated and non methylated CpG dinucleotides within the genomic sequence of interest.

[0020] The present invention makes available a method for ascertaining genetic and/or epigenetic parameters of genomic DNA. The method is for use in the improved diagnosis, treatment and monitoring of hematopoietic cell proliferative disorders, more specifically by enabling the improved identification of and differentiation between subclasses of said disorder and the genetic predisposition to said disorders. The invention presents improvements over the state of the art in that it enables a highly specific classification of hematopoietic cell proliferative disorders, thereby allowing for improved and informed treatment of patients.

[0021] In a particularly preferred embodiment the present invention makes available methods and nucleic acids that allow the differentiation between acute lymphocytic leukemia and acute myelogenous leukemia.

[0022] Furthermore, the method enables the analysis of cytosine methylations and single nucleotide polymorphisms.

[0023] In a preferred embodiment, the method comprises the following steps:

[0024] In the first step of the method the genomic DNA sample must be isolated from sources such as cell lines or blood samples. Extraction may be by means that are standard to one skilled in the art, these include the use of detergent lysates, sonification and vortexing with glass beads. Once the nucleic acids have been extracted the genomic double stranded DNA is used in the analysis.

[0025] In a preferred embodiment the DNA may be cleaved prior to the next step of the method, this may be by any means standard in the state of the art, in particular, but not limited to, with restriction endonucleases.

[0026] In the second step of the method, the genomic DNA sample is treated in such a manner that cytosine bases which are unmethylated at the 5′-position are converted to uracil, thymine, or another base which is dissimilar to cytosine in terms of hybridization behaviour. This will be understood as ‘pretreatment’ hereinafter.

[0027] The above described treatment of genomic DNA is preferably carried out with bisulfite (sulfite, disulfite) and subsequent alkaline hydrolysis which results in a conversion of non-methylated cytosine nucleobases to uracil or to another base which is dissimilar to cytosine in terms of base pairing behaviour. If bisulfite solution is used for the reaction, then an addition takes place at the non-methylated cytosine bases. Moreover, a denaturating reagent or solvent as well as a radical interceptor must be present. A subsequent alkaline hydrolysis then gives rise to the conversion of non-methylated cytosine nucleobases to uracil. The chemically converted DNA is then used for the detection of methylated cytosines.

[0028] Fragments of the pretreated DNA are amplified, using sets of primer oligonucleotides according to SEQ ID NO:387 to SEQ ID NO: 534, and a, preferably heat-stable, polymerase. Because of statistical and practical considerations, preferably more than ten different fragments having a length of 100-2000 base pairs are amplified. The amplification of several DNA segments can be carried out simultaneously in one and the same reaction vessel. Usually, the amplification is carried out by means of a polymerase chain reaction (PCR).

[0029] The method may also be enabled by the use of alternative primers, the design of such primers is obvious to one skilled in the art. These should include at least two oligonucleotides whose sequences are each reverse complementary or identical to an at least 18 base-pair long segment of the base sequences specified in the appendix (SEQ ID NO:95 through SEQ ID NO: 386). Said primer oligonucleotides are preferably characterized in that they do not contain any CpG dinucleotides. In a particularly preferred embodiment of the method, the sequence of said primer oligonucleotides are designed so as to selectively anneal to and amplify, only the hematopoietic cell specific DNA of interest, thereby minimizing the amplification of background or non relevant DNA. In the context of the present invention, background DNA is taken to mean genomic DNA which does not have a relevant tissue specific methylation pattern, in this case, the relevant tissue being hematopoietic cells, both healthy and diseased.

[0030] According to the present invention, it is preferred that at least one primer oligonucleotide is bound to a solid phase during amplification. The different oligonucleotide and/or PNA-oligomer sequences can be arranged on a plane solid phase in the form of a rectangular or hexagonal lattice, the solid phase surface preferably being composed of silicon, glass, polystyrene, aluminum, steel, iron, copper, nickel, silver, or gold, it being possible for other materials such as nitrocellulose or plastics to be used as well.

[0031] The fragments obtained by means of the amplification can carry a directly or indirectly detectable label. Preferred are labels in the form of fluorescence labels, radionuclides, or detachable molecule fragments having a typical mass which can be detected in a mass spectrometer, it being preferred that the fragments that are produced have a single positive or negative net charge for better detectability in the mass spectrometer. The detection may be carried out and visualized by means of matrix assisted laser desorption/ionization mass spectrometry (MALDI) or using electron spray mass spectrometry (ESI).

[0032] The amplificates obtained in the second step of the method are subsequently hybridized to an array or a set of oligonucleotides and/or PNA probes. In this context, the hybridization takes place in the manner described as follows. The set of probes used during the hybridization is preferably composed of at least 10 oligonucleotides or PNA-oligomers. In the process, the amplificates serve as probes which hybridize to oligonucleotides previously bonded to a solid phase. In a particularly preferred embodiment, the oligonucleotides are taken from the group comprising SEQ ID NO: 535 to SEQ ID NO: 1258. In a further preferred embodiment as described in the examples, the oligonucleotides are taken from the group comprising SEQ ID NO: 1211 to SEQ ID NO: 1258. The non-hybridized fragments are subsequently removed. Said oligonucleotides contain at least one base sequence having a length of 10 nucleotides which is reverse complementary or identical to a segment of the base sequences specified in the appendix, the segment containing at least one CpG or TpG dinucleotide. In a further preferred embodiment the cytosine of the CpG dinucleotide, or in the case of TpG, the thiamine, is the 5^{th} to 9^{th} nucleotide from the 5′-end of the 10-mer. One oligonucleotide exists for each CpG or TpG dinucleotide.

[0033] In the fifth step of the method, the non-hybridized amplificates are removed.

[0034] In the final step of the method, the hybridized amplificates are detected. In this context, it is preferred that labels attached to the amplificates are identifiable at each position of the solid phase at which an oligonucleotide sequence is located.

[0035] According to the present invention, it is preferred that the labels of the amplificates are fluorescence labels, radionuclides, or detachable molecule fragments having a typical mass which can be detected in a mass spectrometer. The mass spectrometer is preferred for the detection of the amplificates, fragments of the amplificates or of probes which are complementary to the amplificates, it being possible for the detection to be carried out and visualized by means of matrix assisted laser desorption/ionization mass spectrometry (MALDI) or using electron spray mass spectrometry (ESI). The produced fragments may have a single positive or negative net charge for better detectability in the mass spectrometer.

[0036] The aforementioned method is preferably used for ascertaining genetic and/or epigenetic parameters of genomic DNA.

[0037] In order to enable this method, the invention further provides the modified DNA of genes ABL1, ABL1, APAF1, APC, AR, ARHI, BAK1, BAX, BCL2, CASP10, CASP8, CASP9, CCND2, CDC2, CDC25A, CDH1, CDH3, CDK 4, CDKN1A, CDKN1B (p27 Kip1), CDKN1C, CDKN2a, CDKN2B, CSNK2B, DAPK1, EGR4, ELK1, ESR1, FOS, GPIb beta, GPR37, GSK3β, GSTP1, HIC-1, HOXA5, IGF2, MDR1, MGMT, MLH1, MOS, Humos, MPL, MYC, MYCL1, MYOD1, N33, PITX2, PML, PMS2, PRAME, PTEN, RB1, RBL2, SDC4, SFN, TCL1A, TGFBR2, TP73, WT1, N-MYC, L-MYC, C-ABL, ELK1, Tubulin, CSF1, CD1R3, CSNK2B, Me491/TD63, AR, CDK 4, Humos, CDC25A, CMYCex3 as well as oligonucleotides and/or PNA-oligomers for detecting cytosine methylations within said genes. The present invention is based on the discovery that genetic and epigenetic parameters and, in particular, the cytosine methylation patterns of genomic DNA are particularly suitable for improved diagnosis, treatment and monitoring of hematopoietic cell proliferative disorders. Furthermore, the invention enables the differentiation between different subclasses of hematopoietic cell proliferative disorders or detection of a predisposition to hematopoietic cell proliferative disorders.

[0038] The nucleic acids according to the present invention can be used for the analysis of genetic and/or epigenetic parameters of genomic DNA.

[0039] This objective is achieved according to the present invention using a nucleic acid containing a sequence of at least 18 bases in length of the pretreated genomic DNA according to one of SEQ ID NO: 95 through SEQ ID NO: 386 and sequences complementary thereto.

[0040] The modified nucleic acid could heretofore not be connected with the ascertainment of disease relevant genetic and epigenetic parameters.

[0041] The object of the present invention is further achieved by an oligonucleotide or oligomer for the analysis of pretreated DNA, for detecting the genomic cytosine methylation state, said oligonucleotide containing at least one base sequence having a length of at least 10 nucleotides which hybridizes to a pretreated genomic DNA according to SEQ ID NO: 95 through SEQ ID NO: 386. The oligomer probes according to the present invention constitute important and effective tools which, for the first time, make it possible to ascertain specific genetic and epigenetic parameters during the analysis of biological samples for features associated with the development of hematopoietic cell proliferative disorders. Said oligonucleotides allow the improved diagnosis, treatment and monitoring of hematopoietic cell proliferative disorders and detection of the predisposition to said disorders. Furthermore, they allow the differentiation of different subclasses of hematopoietic carcinomas. The base sequence of the oligomers preferably contains at least one CpG or TpG dinucleotide. The probes may also exist in the form of a PNA (peptide nucleic acid) which has particularly preferred pairing properties. Particularly preferred are oligonucleotides according to the present invention in which the cytosine of the CpG dinucleotide is the 5^{th}-9^{th} nucleotide from the 5′-end of the 13-mer; in the case of PNA-oligomers, it is preferred for the cytosine of the CpG dinucleotide to be the 4^{th}-6^{th} nucleotide from the 5′-end of the 9-mer.

[0042] The oligomers according to the present invention are normally used in so called “sets” which contain at least one oligomer for each of the CpG dinucleotides within SEQ ID NO: 95 through SEQ ID NO: 386. Preferred is a set which contains at least one oligomer for each of the CpG dinucleotides, from SEQ ID NO: 535 through SEQ ID NO: 1258. Further preferred is a set comprising SEQ ID NO: 1211 to SEQ ID NO: 1258.

[0043] In the case of the sets of oligonucleotides according to the present invention, it is preferred that at least one oligonucleotide is bound to a solid phase. It is further preferred that all the oligonucleotides of one set are bound to a solid phase.

[0044] The present invention moreover relates to a set of at least 10 n (oligonucleotides and/or PNA-oligomers) used for detecting the cytosine methylation state of genomic DNA using treated versions of said genomic DNA (according to SEQ ID NO: 95 through SEQ ID NO: 386 and sequences complementary thereto). These probes enable improved diagnosis, treatment and monitoring of hematopoietic cell proliferative disorders. In particular they enable the differentiation between different sub classes of hematopoietic cell proliferative disorders and the detection of a predisposition to said disorders. In a particularly preferred embodiment the set comprises SEQ ID NO: 74 to SEQ ID NO: 1258.

[0045] The set of oligomers may also be used for detecting single nucleotide polymorphisms (SNPs) using pretreated genomic DNA according to one of SEQ ID NO: 95 through SEQ ID NO: 386.

[0046] According to the present invention, it is preferred that an arrangement of different oligonucleotides and/or PNA-oligomers (a so-called “array”) made available by the present invention is present in a manner that it is likewise bound to a solid phase. This array of different oligonucleotide- and/or PNA-oligomer sequences can be characterized in that it is arranged on the solid phase in the form of a rectangular or hexagonal lattice. The solid phase surface is preferably composed of silicon, glass, polystyrene, aluminum, steel, iron, copper, nickel, silver, or gold. However, nitrocellulose as well as plastics such as nylon which can exist in the form of pellets or also as resin matrices are suitable alternatives.

[0047] Therefore, a further subject matter of the present invention is a method for manufacturing an array fixed to a carrier material for the improved diagnosis, treatment and monitoring of hematopoietic cell proliferative disorders, the differentiation between different subclasses of hematopoietic carcinomas and/or detection of the predisposition to hematopoietic cell proliferative disorders. In said method at least one oligomer according to the present invention is coupled to a solid phase. Methods for manufacturing such arrays are known, for example, from U.S. Pat. No. 5,744,305 by means of solid-phase chemistry and photolabile protecting groups.

[0048] A further subject matter of the present invention relates to a DNA chip for the improved diagnosis, treatment and monitoring of hematopoietic cell proliferative disorders. Furthermore the DNA chip enables detection of the predisposition to hematopoietic cell proliferative disorders and the differentiation between different subclasses of hematopoietic carcinomas. The DNA chip contains at least one nucleic acid according to the present invention. DNA chips are known, for example, in U.S. Pat. No. 5,837,832.

[0049] Moreover, a subject matter of the present invention is a kit which may be composed, for example, of a bisulfite-containing reagent, a set of primer oligonucleotides containing at least two oligonucleotides whose sequences in each case correspond to or are complementary to a 18 base long segment of the base sequences specified in the appendix (SEQ ID NO: 95 through SEQ ID NO: 386), oligonucleotides and/or PNA-oligomers as well as instructions for carrying out and evaluating the described method. However, a kit along the lines of the present invention can also contain only part of the aforementioned components.

[0050] The oligomers according to the present invention or arrays thereof as well as a kit according to the present invention are intended to be used for the improved diagnosis, treatment and monitoring of hematopoietic cell proliferative disorders. Furthermore the use of said inventions extends to the differentiation between different subclasses of hematopoietic carcinomas and detection of the predisposition to hematopoietic cell proliferative disorders. According to the present invention, the method is preferably used for the analysis of important genetic and/or epigenetic parameters within genomic DNA, in particular for use in improved diagnosis, treatment and monitoring of hematopoietic cell proliferative disorders, detection of the predisposition to said disorders and the differentiation between subclasses of said disorders.

[0051] The methods according to the present invention are used, for example, for improved diagnosis, treatment and monitoring of hematopoietic cell proliferative disorders progression, detection of the predisposition to said disorders and the differentiation between subclasses of said disorders.

[0052] A further embodiment of the invention is a method for the analysis of the methylation status of genomic DNA without the need for pretreatment. In the first step of the method the genomic DNA sample must be isolated from tissue or cellular sources. Such sources may include cell lines, histological slides, body fluids, or tissue embedded in paraffin. Extraction may be by means that are standard to one skilled in the art, these include the use of detergent lysates, sonification and vortexing with glass beads. Once the nucleic acids have been extracted the genomic double stranded DNA is used in the analysis.

[0053] In a preferred embodiment the DNA may be cleaved prior to the treatment, this may be any means standard in the state of the art, in particular with restriction endonucleases. In the second step, the DNA is then digested with one or more methylation sensitive restriction enzymes. The digestion is carried out such that hydrolysis of the DNA at the restriction site is informative of the methylation status of a specific CpG dinucleotide.

[0054] In the third step the restriction fragments are amplified. In a preferred embodiment this is carried out using a polymerase chain reaction.

[0055] In the final step the amplificates are detected. The detection may be by any means standard in the art, for example, but not limited to, gel electrophoresis analysis, hybridisation analysis, incorporation of detectable tags within the PCR products, DNA array analysis, MALDI or ESI analysis.

[0056] The analysis of the methylation status of CpG positions using either of the molecular biological techniques described above in multiple patient samples generates a large set of data points which are then analysed using the following techniques in order to define CpG marker positions fpr a particular phenotypic class, in particular by using supervised machine learning techniques.

[0057] The problem of class prediction was addressed by using a supervised machine learning method called support vector machine (SVM) (V. Vapnik, Statistical Learning Theory (Wiley, New York 1998); N. Christianini, J. Shawe-Taylor, An Introduction to Support Vector Machines (Cambridge University Press, Cambridge 2000)), which has already been successfully applied to the analysis of microarray gene expression data (M. P. Brown et al., Proc Natl Acad Sci USA 97, 262(2000); T. Gaasterland, S. Bekiranov, Nature Genetics 24, 204(2000)). The SVM constructs an optimal discriminant between two classes of given training samples. In this case each sample is described by the methylation patterns (CG/TG ratios) at the investigated CpG sites. A supervised learning technique, such as SVM, has the advantage that it exploits the prior knowledge represented by data labels. Furthermore, SVMs are capable to account for highly non-linear interdependencies between individual dimensions (in this case CpG sites) and still avoid overfitting the data (V. Vapnik, Statistical Learning Theory (Wiley, New York 1998)).

[0058] In order to quantify the contribution of single CpG sites to the prediction of classes, we initially ranked all CpG sites according to their discriminatory power for the investigated sample classes using a two sample t-test. Then the SVM was trained using an increasing number of CpG sites in the order of their ranking. The number of CpG sites where the prediction error is minimized depends on which particular classes are to be separated from each other. This is explained by the fact that, on the one hand, the exclusion of certain CpG positions from the analysis potentially leads to a loss of information. On the other hand, as suggested by statistical learning theory (V Vapnik, Statistical Learning Theory (Wiley, New York 1998)), for a limited number of samples the reliability of the class-predictor generally increases with decreasing number of free parameters, in our case number of CpG sites. The inherent, task-specific complexity of the classification problem determines where these two counteracting effects are balanced and class prediction achieves its optimal performance., This suggests, that a proper feature selection in genome-wide analyses not only improves class prediction J. Weston et al., in Advances in neural information processing systems (MIT Press, Cambridge, Mass. 2001), but also provides information about the complexity of the problem.

[0059] The present invention moreover relates to the diagnosis and/or prognosis of events which are disadvantageous or relevant to patients or individuals in which important genetic and/or epigenetic parameters within genomic DNA, said parameters obtained by means of the present invention may be compared to another set of genetic and/or epigenetic parameters, the differences serving as the basis for the diagnosis and/or prognosis of events which are disadvantageous or relevant to patients or individuals.

[0060] In the context of the present invention the term “hybridization” is to be understood as a bond of an oligonucleotide to a completely complementary sequence along the lines of the Watson-Crick base pairings in the sample DNA, forming a duplex structure.

[0061] In the context of the present invention, “genetic parameters” are mutations and polymorphisms of genomic DNA and sequences further required for their regulation. To be designated as mutations are, in particular, insertions, deletions, point mutations, inversions and polymorphisms and, particularly preferred, SNPs (single nucleotide polymorphisms).

[0062] In the context of the present invention, “epigenetic parameters” are, in particular, cytosine methylations and further modifications of DNA bases of genomic DNA and sequences further required for their regulation. Further epigenetic parameters include, for example, the acetylation of histones which, cannot be directly analyzed using the described method but which, in turn, correlates with the DNA methylation.

[0063] In the following, the present invention will be explained in greater detail on the basis of the sequences and examples without being limited thereto.

[0064] SEQ ID NO: 1 to SEQ ID NO: 73 represent 5′ and/or regulatory regions of the genomic DNA of genes: ABL1, ABL1, APAF1, APC, AR, ARHI, BAK1, BAX, BCL2, CASP10, CASP8, CASP9, CCND2, CDC2, CDC25A, CDH1, CDH3, CDK 4, CDKN1A, CDKN1B (p27 Kip1), CDKN1C, CDKN2a, CDKN2B, CSNK2B, DAPK1, EGR4, ELK1, ESR1, FOS, GPIb beta, GPR37, GSK3β, GSTP1, HIC-1, HOXA5, IGF2, MDR1, MGMT, MLH1, MOS, Humos, MPL, MYC, MYCL1, MYOD1, N33, PITX2, PML, PMS2, PRAME, PTEN, RB1, RBL2, SDC4, SFN, TCL1A, TGFBR2, TP73, WT1, N-MYC, L-MYC, C-ABL, ELK1, Tubulin, CSF1, CD1R3, CSNK2B, Me491/TD63, AR, CDK 4, Humos, CDC25A, CMYCex3. These sequences are derived from Genbank and will be taken to include all minor variations of the sequence material which are currently unforeseen, for example, but not limited to, minor deletions and SNPs.

[0065] SEQ ID NO: 95 to SEQ ID NO: 386 exhibit the pretreated sequence of DNA derived from genes: ABL1, ABL1, APAF1, APC, AR, ARHI, BAK1, BAX, BCL2, CASP10, CASP8, CASP9, CCND2, CDC2, CDC25A, CDH1, CDH3, CDK 4, CDKN1A, CDKN1B (p27 Kip1), CDKN1C, CDKN2a, CDKN2B, CSNK2B, DAPK1, EGR4, ELK1, ESR1, FOS, GPIb beta, GPR37, GSK3β, GSTP1, HIC-1, HOXA5, IGF2, MDR1, MGMT, MLH1, MOS, Humos, MPL, MYC, MYCL1, MYOD1, N33, PITX2, PML, PMS2, PRAME, PTEN, RB1, RBL2, SDC4, SFN, TCL1A, TGFBR2, TP73, WT1, N-MYC, L-MYC, C-ABL, ELK1, Tubulin, CSF1, CD1R3, CSNK2B, Me491/TD63, AR, CDK 4, Humos, CDC25A, CMYCex3. These sequences will be taken to include all minor variations of the sequence material which are currently unforeseen, for example, but not limited to, minor deletions and SNPs.

[0066] SEQ ID NO: 387 to SEQ ID NO: 534 exhibit the sequence of primer oligonucleotides for the amplification of pretreated DNA according to SEQ ID NO: 95 to SEQ ID NO: 386.

[0067] SEQ ID NO: [&IDOLIGOFIRST] to SEQ ID NO: 1258 exhibit the sequence of oligomers which are useful for the analysis of CpG positions within genomic DNA according to SEQ ID NO: 1 to SEQ ID NO: 73.

[0068] SEQ ID NO: 1211 to SEQ ID NO: 1258 exhibit the sequence of oligomers which are useful for the analysis of CpG positions within genomic DNA according to SEQ ID NO: 1 to SEQ ID NO: 73.

### EXAMPLES 1 AND 2

### Digital Phenotype

[0069] In the following examples, multiplex PCR was carried out on samples from patients with acute lymphocytic leukemia and acute myelogenous leukemia. Each sample was treated in the manner described below in Example 1 in order to deduce the methylation status of CpG positions, the CpG methylation information for each sample was collated and then used in an analysis, as detailed in Example 2. An alternative method for the analysis of CpG methylation status is further described in Example 3.

### EXAMPLE 1

[0070] A total of 17 ALL samples and 8 AML samples were included. T- and B-cells from 8 healthy donors, MACS-sorted with anti-CD4 and anti-CD19 antibodies, respectively, served as controls. 11 genes were randomly selected from a panel of genes representing different pathways associated with tumourigenesis. Two of the 11 selected genes are located on the X-chromosome. A total of 81 CpG dinucleotides located in CpG rich regions of the promoters, intronic and coding sequences of these genes were evaluated for methylation status.

[0071] In order to allow sequence specific distinction of the methylated from the unmethylated state of CpG dinucleotides by hybridisation analysis, total DNA from all samples was bisulphite treated converting all unmethylated cytosines to uracil whereas methylated cytosines were conserved (M. Frommer et al., Proc Natl Acad Sci USA 89, 1827 (1992)). Regions of interest were then amplified by PCR using fluorescently labelled primers converting originally unmethylated CpG dinucleotides to TG and conserving originally methylated CpG sites. Primers were designed complementary to DNA segments containing no CpG dinucleotides. This allowed unbiased amplification of both methylated and unmethylated alleles in one reaction. All PCR products performed on an individual sample were mixed and hybridised to glass slides carrying for each CpG position a pair of immobilised oligonucleotides. Each of these detection oligonucleotides was designed to hybridise to the bisulphite converted sequence around one CpG site which was either originally unmethylated (TG) or methylated (CG). Hybridisation conditions were selected to allow the detection of the single nucleotide differences between the TG and CG variants. Ratios for the two signals were calculated based on comparison of intensity of the fluorescent signals. Sensitivity for detection of methylation changes was determined using artificially up- and downmethylated DNA fragments mixed at different ratios. For each of those mixtures, a series of experiments was conducted to define the range of CG/TG ratios that corresponds to varying degrees of methylation at each of the CpG sites tested.

[0072] In the first step the genomic DNA was isolated from the cell samples using the Wizzard kit from (Promega).

[0073] The isolated genomic DNA from the samples are treated using a bisulfite solution (hydrogen sulfite, disulfite). The treatment is such that all non methylated cytosines within the sample are converted to thiamidine, conversely 5-methylated cytosines within the sample remain unmodified. Bisulphite treatment of genomic DNA was done with minor modifications as described by A. Olek, J. Oswald, J. Walter, Nucleic Acid Res. 24, 5064 (1996). Genomic DNA was digested with MssI (MBI Fermentas, St. Leon-Rot, Germany) prior to the modification by bisulphite.

[0074] The treated nucleic acids were then amplified using multiplex PCRs, amplifying 8 fragments per reaction with Cy5 fluorescently labelled primers. PCR primers used are described in Table 1. PCR conditions were as follows.

[0075] For the PCR amplification of the bisulphite treated sense strand of the genes used for class prediction and discovery the primers were designed according to the guidelines of Clark and Frommer (S. J. Clark, M. Frommer, in Laboratory Methods for the Detection of Mutations and Polymorphisms in DNA, G. R. Taylor ed. (CRC Press, Boca Raton 1997)). CpG sites from the following genes were analysed: ABL1, ABL1, APAF1, APC, AR, ARHI, BAK1, BAX, BCL2, CASP10, CASP8, CASP9, CCND2, CDC2, CDC25A, CDH1, CDH3, CDK 4, CDKN1A, CDKN1B (p27 Kip1), CDKN1C, CDKN2a, CDKN2B, CSNK2B, DAPK1, EGR4, ELK1, ESR1, FOS, GPIb beta, GPR37, GSK3β, GSTP1, HIC-1, HOXA5, IGF2, MDR1, MGMT, MLH1, MOS, Humos, MPL, MYC, MYCL1, MYOD1, N33, PITX2, PML, PMS2, PRAME, PTEN, RB1, RBL2, SDC4, SFN, TCL1A, TGFBR2, TP73, WT1, N-MYC, L-MYC, C-ABL, ELK1, Tubulin, CSF1, CD1R3, CSNK2B, Me491/TD63, AR, CDK 4, Humos, CDC25A, CMYCex3.

[0076] 10 ng DNA was used as template DNA for the PCR reactions. The template DNA, 12.5 pmol or 40 pmol (CY5-labelled) of each primer, 0.5-2 U Taq polymerase (HotStarTaq, Qiagen, Hilden, Germany) and 1 mM dNTPs were incubated with the reaction buffer supplied with the enzyme in a total volume of 20 μl. After activation of the enzyme (15 min, 96° C.) the incubation times and temperatures were 95° C. for 1 min followed by 34 cycles (95° C. for 1 min, annealing temperature (see Supplementary information) for 45 sec, 72° C. for 75 sec) and 72° C. for 10 min.

[0077] See Table 2 for further details of PCR products.

[0078] All PCR products from each individual sample were then hybridised to glass slides carrying a pair of immobilised oligonucleotides for each CpG position under analysis. Each of these detection oligonucleotides was designed to hybridise to the bisulphite converted sequence around one CpG site which was either originally unmethylated (TG) or methylated (CG). See Table 3 for further details of all hybridisation oligonucleotides used (both informative and non-informative) Hybridisation conditions were selected to allow the detection of the single nucleotide differences between the TG and CG variants.

[0079] Oligonucleotides with a C6-amino modification at the 5′end were spotted with 4-fold redundancy on activated glass slides (T. R. Golub et al., Science 286, 531 (1999)). For each analysed CpG position two oligonucleotides N₍₂₋₁₆₎-CG-N₍₂₋₁₆₎ and N₍₂₋₁₆₎-TG-N₍₂₋₁₆₎, reflecting the methylated and non methylated status of the CpG dinucleotides, were spotted and immobilised on the glass array. The oligonucleotide microarrays representing 81 CpG sites were hybridised with a combination of up to 11 Cy5-labelled PCR fragments as described earlier (D. Chen, Z. Yan, D. L. Cole, G. S. Srivatsa, Nucleic Acid Res 27, 389 (1999)). Subsequently, the fluorescent images of the hybridised slides were obtained using a GenePix 4000 microarray scanner (Axon Instruments). Hybridisation experiments were repeated at least three times for each sample.

[0080] The sensitivity of the method for detection of methylation changes was determined using artificially up- and downmethylated DNA fragments mixed at different ratios. For each of those mixtures, a series of experiments was conducted to define the range of CG/TG ratios that corresponds to varying degrees of methylation at each of the CpG sites tested. In FIG. 1B results for two CpG positions located in exon 14 of the human factor VIII gene are shown as examples. For the mixtures of 3:0, 2:1, 1:2 and 0:3 the degree of methylation of the individual CpG sites could safely be distinguished.

[0081] To verify the detection of methylation changes in the real data set two X-chromosomal genes were included in the gene set. Because one of the two X-chromosomes in females becomes inactivated by methylation we can expect a higher degree of methylation of X-chromosomal genes in females compared to males. In FIG. 2A CpGs are ranked according to the significance of the difference between male and female methylation levels. As expected, the X-chromosomal genes (ELK1, AR) show a significantly higher methylation for females. This clearly demonstrates that the method really detects changes in methylation.

### Statistical Analysis

### Support Vector Machines

[0082] In our case, the task of cancer classification consists of constructing a machine that can predict the leukemia subtype (ALL or AML) from a patients methylation pattern. For every patient sample this pattern is given as a vector of average (Every hybridisation experiment was at least 3 times repeated and the results averaged.) log CG/TG ratios at 81 CpG positions. Based on a given set of training examples X={xⁱ:xⁱ i Rⁿ} with known diagnosis Y={yⁱ:yⁱ i {ALL,AML}} a discriminant function f: Rⁿ ® {ALL,AML}, where n is the number of CpGs, has to be learned. The number of misclassifications of f on the training set {X,Y} is called training error and is usually minimised by the learning machine during the training phase. However, what is of practical interest is the capability to predict the class of previously unseen samples, the so called generalisation performance of the learning machine. This performance is usually estimated by the test error, which is the number of misclassifications on an independent test set {X′,Y′}.

[0083] The major problem of training a learning machine with good generalisation performance is to find a discriminant function f which on the one hand is complex enough to capture the essential properties of the data distribution, but which on the other hand avoids over-fitting the data. The Support Vector Machine (SVM) tries to solve this problem by constructing a linear discriminant that separates the training data and maximises the distance to the nearest points of the training set. This maximum margin separating hyperplane minimises the ratio between the radius of the minimum enclosing sphere of the training set and the margin between hyperplane and training points. This corresponds to minimising the so called radius margin bound on the expected probability of a test error and promises good generalisation performance (Vapnik V. “Statistical Learning Theory.” Wiley, New York (1998)).

[0084] Of course there are more complex classification problems, where the dependence between class labels yⁱ and features xⁱ is not linear and the training set can not be separated by a hyperplane. In order to allow for non-linear discriminant functions the input space can be non-linearly mapped into a potentially higher dimensional feature space by a mapping function F: xⁱ ® F(xⁱ). Because the SVM algorithm in its dual formulation uses only the inner product between elements of the input space, the knowledge of the kernel function K(xⁱ, x^{j})=<F(xⁱ)·F(x^{j})> is sufficient to train the SVM. It is not necessary to explicitly know the mapping F and a non-linear SVM can be trained efficiently by computing only the kernel function. Here we will only use the linear kernel K(xⁱ, x^{j})=<x^{i,} x^{j}> and the quadratic kernel K(xⁱ, x^{j})=(<x^{i,xj}>+1)₂. In the next section we will compare SVMs trained on different feature sets. In order to evaluate the prediction performance of these SVMs we used a cross-validation method (Bishop, C. M. “Neural networks for pattern recognition.” Oxford University Press, New York (1995)). For each classification task, the samples were partitioned into 8 groups of approximately equal size. Then the SVM predicted the class for the test samples in one group after it had been trained using the 7 other groups. The number of misclassifications was counted over 8 runs of the SVM algorithm for all possible choices of the test group. To obtain a reliable estimate for the test error the number of misclassifications were averaged over 50 different partitionings of the samples into 8 groups.

### Feature Selection

[0085] The simplest way for applying a SVM to our methylation data is to use every CpG position as a separate dimension, not making any assumption about the interdependence of CpG sites from the same gene. On the leukemia subclassification task the SVM with linear kernel trained on this 81 dimensional input space had an average test error of 16%. Using a quadratic kernel did not significantly improve the results.

[0086] An obvious explanation for this relatively poor performance is that we have only 25 data points (even less in the training set) in a 81 dimensional space. Finding a separating hyperplane under these conditions is a heavily under-determined problem. And as it turns out, the SVM technique of maximising the margin is not sufficient to find the solution with optimal generalisation properties. It is necessary to reduce the dimensionality of the input space while retaining the relevant information for classification. This should be possible because it can be expected that only a minority of CpG positions has any connection with the two subtypes of leukemia.

### Principle Component Analysis

[0087] The probably most popular method for dimension reduction is principle component analysis (PCA) (Bishop, C. M. “Neural networks for pattern recognition.” Oxford University Press, New York (1995)). For a given training set X, PCA constructs a set of orthogonal vectors (principle components) which correspond to the directions of maximum variance. The projection of X onto the first k principle components gives the 2-norm optimal representation of X in a k-dimensional orthogonal subspace. Because this projection does not explicitly use the class information Y, PCA is an unsupervised learning technique.

[0088] In order to reduce the dimension of the input space for the SVM we performed a PCA on the combined training and test set {X,X′} and projected both sets on the first k principle components. This gives considerably better results than performing PCA only on the training set X and is justified by the fact that no label information is used. However, the generalisation results for k=2 and k=5, were even worse than for the SVM without feature selection. The reason for this is that PCA does not necessarily extract features that are important for the discrimination between ALL and AML. It first picks the features with the highest variance, which are in this case discriminating between cell lines and primary patient tissue (see FIG. 4, right, second line), i.e. subgroups that are not relevant to the classification task. As is shown in FIG. 6, features carrying information about the leukemia subclasses appear only from the 9th principle component on. The generalisation performance including the 9th component is significantly better than for a SVM without feature selection. However, it seems clear that a supervised feature selection method, which takes the class labels of the training set into account, should be more reliable and give better generalisation.

[0089] FIG. 4A shows the methylation profiles of the best 20 CpGs according to the Fisher criterion.

### Fisher Criterion and t-Test

[0090] A classical measure to asses the degree of separation between two classes is given by the Fisher criterion cite (Bishop, C. M. “Neural networks for pattern recognition.” Oxford University Press, New York (1995)). In our case it gives the discriminative power of the kth CpG as

[0091] where (mₖ)^{ALL/AML} is the mean and (sₖ)^{ALL/AML} is the standard deviation of all (′ₖ)ⁱ with yᵢ=ALL/AML. The Fisher criterion gives a high ranking for CpGs where the two classes are far apart compared to the within class variances. A very similar criterion was used by Golub and coworkers for their ALL/AML classification based on mRNA expression data (T. R. Golub et al., Science 286, 531 (1999)). FIG. 4B hows the methylation profiles of the best 20 CpGs according to the Fisher criterion.

[0092] Another approach to rank CpGs by their discriminative power is to use a test statistic for computing the significance of class differences. Here we assumed normal distribution of the two classes and used a two sample t-test to rank the CpGs according to the significance of the difference between the class means (Mendenhall, W., Sincich, T., “Statistics for engineering and the sciences.” FIG. 4 (right, first line) shows the ranking, which is very similar to the Fisher criterion because a large mean difference and a small within class variance are again the important factors.

[0093] In order to improve classification performance we trained SVMs on the k highest ranking CpGs according to the Fisher criterion or t-test. FIG. 5 shows a trained SVM on the best two CpGs from the Fisher criterion. The test errors for k=2 and k=5 are given in the table above. The results show a dramatic improvement of generalisation performance. Using Fisher criterion for feature selection and k=5 CpGs the test error was decreased to 3% compared to 16% for the SVM without feature selection. FIG. 6 shows the dependence of generalisation performance from the selected dimension k and indicates that especially the Fisher criterion gives dimension independent good generalisation for reasonable small k.

[0094] Although the two described CpG ranking methods give very good generalisation, they have some potential drawbacks. One problem is that they can only detect linear dependencies between features and class labels. A simple XOR or even OR combination of two CpGs would be completely missed. Another drawback is that redundant features are not removed. In our case there are usually several CpGs from the same gene which have a high likelihood of comethylation. This can result in a large set of high ranking features which carry essentially the same information. Although the good results seem to indicate that the described problems do not appear in our data set, they should be considered.

### Backward Elimination

[0095] PCA, Fisher criterion and t-test construct or rank features independent of the leaning machine that does the actual classification and are therefore called filter methods (Blum, A., Langley, P. “Selection of relevant features and examples in machine learning.” Artificial Intelligence 97, 245-271 (1997)). Another approach is to use the learning machine itself for feature selection. These techniques are called wrapper methods and try to identify the features that are important for the generalisation capability of the machine. Here we propose to use the features that are important for achieving a low training error as a simple approximation. In the case of a SVM with linear kernel these features are easily identified by looking at the normal vector w of the separating hyperplane. The smaller the angle between a feature basis vector and the normal vector the more important is the feature for the separation. Features orthogonal to the normal vector have obviously no influence on the discrimination at all. This means the feature ranking is simply given by the components of the normal vector as (wₖ₎². Of course this ranking is not very realistic because the SVM solution on the full feature set is far from optimal as we demonstrated in the last subsections. A simple heuristic is to assume that the feature with the smallest (wₖ)² is really unimportant for the solution and can be safely removed from the feature set.

[0096] Then the SVM can be retrained on the reduced feature set and the procedure is repeated until the feature set is empty. Such a successive feature removal is called backward elimination (Blum, A., Langley, P. “Selection of relevant features and examples in machine learning.” Artificial Intelligence 97, 245-271 (1997)). The resulting CpG ranking on our data set is shown in FIG. 4D and differs considerably from the Fisher and t-test rankings. It seems backward elimination is able to remove redundant features. However, as shown in the table above and FIG. 6 the generalisation results are not better than for the Fisher criterion. Furthermore, backward elimination seems to be more dimension dependent and it is computationally more expensive. It follows that at least for this data set the simple Fisher criterion is the preferable feature selection technique.

### Exhaustive Search

[0097] A canonical way to construct a wrapper method for feature selection is to evaluate the generalisation performance of the learning machine on every possible feature subset. Cross-validation on the training set can be used to estimate the generalisation of the machine on a given feature set. What makes this exhaustive search of the feature space practically useless is the enormous number of 2ⁿ different feature combinations and there are numerous heuristics to search the feature space more efficiently (e.g. backward elimination) (Blum, A., Langley, P. “Selection of relevant features and examples in machine learning.” Artificial Intelligence 97, 245-271 (1997)).

[0098] Here we only want to demonstrate that there are no higher order correlations between features and class labels in our data set In order to do this we exhaustively searched the space of all two feature combinations. For every of the 3240 two CpG combinations of k=2 CpGs at the same time without repetitions, out of all together n=81 CpGs we computed the leave-one-out cross-validation error of a SVM with quadratic kernel on the training set. From all CpG pairs with minimum leave-one-out error we selected the one with the smallest radius margin ratio. This pair was considered to be the optimal feature combination and was used to evaluate the generalisation performance of the SVM on the test set.

[0099] The average test error of the exhaustive search method was with 6% the same as the one of the Fisher criterion in the case of two features and a quadratic kernel. For five features the exhaustive computation is already infeasible. In the absolute majority of cross-validation runs the CpGs selected by exhaustive search and Fisher criterion were identical. In some cases suboptimal CpGs were chosen by the exhaustive search method. These results clearly demonstrate that there are no higher order feature combinations in our data set that are important for an ALL/AML discrimination.

### EXAMPLE 2

[0100] The data obtained according to Example 1 is sorted into a ranked matrix (FIGS. 3 to 8) according to CpG methylation differences between the two classes of diseased and healthy hematopoietic cells using an algorithim. The most significant CpG positions are at the bottom of the matrix with significance decreasing towards the top. On the right side of the matrix p values for the individual CpG positions are shown. The p values are the probabilities that the observed distribution occurred by chance in the data set.

[0101] As discussed above, for selected distinctions, we trained a learning algorithm (support vector machine, SVM). The SVM (as discussed by F. Model, P. Adorjan, A. Olek, C. Piepenbrock, Feature selection for DNA methylation based cancer classification. Bioinformatics. 2001 June;17 Suppl 1:S157-64) constructs an optimal discriminant between two classes of given training samples. In this case each sample is described by the methylation patterns (CG/TG ratios) at the investigated CpG sites. The SVM was trained on a subset of samples of each class, which were presented with the diagnosis attached. Independent test samples, which were not shown to the SVM before were then presented to evaluate, if the diagnosis can be predicted correctly based on the predictor created in the training round.

[0102] A cross validation method was used to evaluate the prediction performance of the SVM (C. M. Bishop, Neural networks for pattern recognition (Oxford University Press, New York 1995)). For each classification task, the samples were partitioned into 8 groups of approximately equal size. Then the SVM predicted the class for the test samples in one group after it had been trained using the 7 other groups. The number of misclassifications was counted over 8 runs of the SVM algorithm for all possible choices of the test group. To obtain a reliable estimate for the test error, i.e. the probability of misclassification for a previously unknown sample, the number of misclassifications were averaged over 10 different partitionings of the samples into 8 groups.

[0103] The SVM was trained to recognise the difference between healthy CD 19+ B cells and CD4+ T cells, and T and B cell leukaemias (from both patient samples and cell lines). Samples could be classified with 15% test error using the two most informative CpG positions. Remarkably, the test error could be reduced to 4% by including a total of 54 CpG positions into the analysis. Individual CpG sites were ranked according to their contribution to the decision of the support vector machine, showing that the decision between healthy T and B cells and ALL was primarily based on CpG sites located in intron 1 of the CDK4 gene and the coding sequence of the c-MOS oncogene, but CpG sites located in regulatory regions of other genes contributed significantly (Table 1 and FIGS. 2B and 2C). Compared to the healthy group, the tumour cells consistently showed relative hypermethylation of these particular CpG sites. Also, classification could be achieved between ALL patient samples and healthy donor B and T cells with a test error of only 13% using two CpG positions. This low-dimensional classification was based on methylation status of CpG sites from CSNK2B and CDC25A, both of which were hypermethylated in ALL patients. The test error could be further improved to 5% by increasing the number of CpG positions used for classification to a total of 31.

[0104] In a next step, we tried to distinguish the two classes of leukaemia. Again the support vector machine was initially presented with a training set of AML and ALL samples (from both patient samples and cell lines) with the class information attached. Previously not included samples could then be classified into one of the classes with a test error of 5% when using two CpG positions. The optimal number of CpG sites in this case was calculated to be 6, decreasing the test error to only 1% (Table 1 and FIG. 3B). The most informative CpG sites were located in intron 1 of the CDK4 gene and the promoter region of CSNK2B. The overall degree of methylation at these sites was reproducibly higher in ALL than in AML cells. However, the CpG sites in the CDK4 gene contributing information to this particular decision were different from those in the same gene distinguishing between ALL and healthy lymphocytes. This shows clearly that in some cases, different CpG sites within one cluster can contribute independent information, with different CpG sites potentially answering questions on different aspects of a phenotype.

[0105] There is evidence that CpG islands of several tissue-specific genes become methylated in cell lines (F. Antequera, J. Boyes, A. Bird, Cell 62, 503 (1990)). Hence, it is important to rule out that the above classifications are based on cell line specific artefacts rather than on disease specific changes. We therefore grouped leukaemia cell lines in one and primary leukaemia samples into another class. Classification was possible with at test error of 28% based on 2 CpG positions and 12% using 30 CpG sites (Table 1). Importantly, the CpG sites that contributed most to this distinction were not informative in any of the earlier classifications, excluding that any of them is based merely on cell line specific markers. This knowledge then enabled us to identify disease specific methylation differences between healthy T cells and T-ALL cell lines. Classification was performed with a test error of 0% based on two CpG positions, which could not distinguish cell lines from non cell lines. Decisive CpG sites were located in the coding sequence of the c-MOS gene (Table 1). In conclusion, although our results confirm the occurrence of cell line specific methylation changes, these do not interfere with classification of tumour types.

[0106] FIG. 7 shows the use of a selection of genes from the panel for use in differentiating between acute lymphocytic leukemia and acute myelogenous leukemia. Using the 2 most significant CpG positions, test error was calculated to be 5%. The optimal number of CpG sites in this case was calculated to be 6, decreasing the test error to 1%. The most informative CpG sites were located in intron 1 of the CDK4 gene and the promoter region of CSNK2B. The overall degree of methylation at these sites was reproducibly higher in ALL than in AML cells. However, the CpG sites in the CDK4 gene contributing information to this particular decision were different from those in the same gene distinguishing between ALL and healthy lymphocytes. This shows clearly that in some cases, different CpG sites within one cluster can contribute independent information, with different CpG sites potentially answering questions on different aspects of a phenotype.

[0107] FIG. 8 shows the use of an alternative selection of genes from the panel for use in differentiating between acute lymphocytic leukemia and acute myelogenous leukemia. The test error in this case was 16.3%.

[0108] In all classes classification results were comparable to mRNA based assays regarding test error, safety and reproducibility. However, classification was achieved with significantly fewer, randomly chosen genes, suggesting that methylation data may actually contain more information per dimension than expression profiles.

[0109] More importantly, in expression profiling signal intensities strongly depend on both the absolute and relative amounts of the different mRNA-species, comparison between independent experiments is challenging at best. Hence, although signals are generally calibrated against those derived from housekeeping genes, there remains an inability of mRNA profiling to detect subtle changes in expression levels (R. J. Lipshutz, S. P. A Fodor, T. R. Gingeras, D. J. Lockhart, Nature Genetics 21, 20 (1999)). In our approach, a CG/TG ratio is used as an internal calibration, and thus the amount of probe hybridised to the slide does not influence the results. This greatly improves the comparability of the results and therefore enables the screening of larger populations, as for example needed in multicenter trials and prospective studies.

### EXAMPLE 3

### Identification of the methylation status of a CpG site within the gene N33 (NM_{—}006765).

[0110] A fragment of the gene N33 (Seq ID NO: &[GENEID_{—}2188]) was PCR amplified using primers AAAGCCGCTGCCATCC and TTTCGGCGACGGTAGG. The resultant fragment (548 bp in length) contained an informative CpG at position 446. The amplificate DNA was digested with the restriction endonuclease Faul, recogniton site CCCGC. Hydrolysis by said endonuclease is blocked by methylation of the CpG at position 446 of the amplificate. The digest was used as a control.

[0111] Genomic DNA was isolated from sample using the DNA wizzard DNA isolation kit (Promega). Each sample was digested using AvaI according to manufacturer's recommendations (New England Biolabs).

[0112] 10 ng of each genomic digest was then amplified using PCR primers AAAGCCGCTGCCATCC and TTTCGGCGACGGTAGG. The PCR reactions were performed using a thermocycler (Eppendorf GmbH) using 10 ng of DNA, 6 pmole of each primer, 200 μM of each dNTP, 1.5 mM MgCl2 and 1 U of HotstartTaq (Qiagen AG). The other conditions were as recommended by the Taq polymerase manufacturer. Using the above mentioned primers, gene fragments were amplified by PCR performing a first denaturation step for 14 min at 96° C., followed by 30-45 cycles (step 2: 60 sec at 96° C., step 3: 45 sec at 52° C., step 4: 75 sec at 72° C.) and a subsequent final elongation of 10 min at 72° C. The presence of PCR products was analysed by agrarose gel electrophoresis.

[0113] PCR products were detectable with FauI hydrolyzed DNA isolated wherein the CpG position in question was upmethylated, when step 2 to step 4 of the cycle program were repeated 34, 37, 39, 42 and 45 fold. In contrast PCR products were only detectable with Faul hydrolyzed DNA isolated from downmethylated DNA (and control DNA) when step 2 to step 4 of the cycle program were repeated 39, 42 and 45 fold. These results were incorporated into a CpG methylation matrix analysis as described in Example 2.

### Tables

[0114] TABLE 1

| | | | | Test Error | Significance | Optimal | Test Error | Significance |
|---|---|---|---|---|---|---|---|---|
| Class 1 | | Class 2 | | 2 CpGs | 2 CpGs | CpG Number | optimal CpGs | optimal CpGs |
| Healthy-B | 13 | B-ALL-cl | 17 | 15% | 1.3E−4 | 54 | 4% | 3.2E−7 |
| Healthy-T | | T-ALL-cl | | | | | | |
| | | ALL | | | | | | |
| B-ALL-cl | 17 | AML | 8 | 5% | 3.7E−4 | 6 | 1% | 5.4E−10 |
| T-ALL-cl | | AML-cl | | | | | | |
| ALL | | | | | | | | |
| Female-nocl | 14 | Male-nocl | 7 | 5% | 7.4E−4 | 2 | 5% | 7.4E−4 |
| Healthy-T | 6 | T-ALL-cl | 6 | 0% | 2.5E−3 | 2 | 0% | 2.5E−3 |
| Healthy-B | 13 | AML | 8 | 16% | 6.9E−3 | 22 | 0% | 2.3E−6 |
| Healthy-T | | AML-cl | | | | | | |
| Primary leukaemia | 8 | CellLines | 17 | 28% | 2.2E−2 | 30 | 12% | 7.9E−5 |
| samples | | | | | | | | |
| Healthy-B | 13 | ALL | 5 | 13% | 8.2E−3 | 31 | 5% | 9.1E−5 |
| Healthy-T | | | | | | | | |
| Healthy-B | 7 | B-ALL-cl | 6 | 27% | 5.5E−2 | 11 | 8% | 1.8E−3 |
| Female-cl | 9 | Male-cl | 8 | 52% | 5.3E−1 | 42 | 40% | 1.9E−1 |
| B-ALL-cl | 6 | T-ALL-cl | 6 | 58% | 5.7E−1 | 70 | 51% | 3.9E−1 |
| Healthy-B | 7 | Healthy-T | 6 | 63% | 6.8E−1 | 11 | 49% | 3.8E−1 |

[0115] TABLE 2

PCR primers and products

Amplificate

| | | | |
|---|---|---|---|
| No: | Gene: | Primer: | Length: |

| | | | |
|---|---|---|---|
| 1 | MDR1 | TAAGTATGTTGAAGAAAGATTATTGTAG | 633 |
| | (SEQ ID NO: 37) | (SEQ ID NO: 388) | |
| | | TAAAAACTATCCCATAATAACTCCCAAC | |
| | | (SEQ ID NO: 387) | |
| 2 | CSNK2B | GGGGAAATGGAGAAGTGTAA | 524 |
| | (SEQ ID NO: 67) | (SEQ ID NO: 512) | |
| | | CTACCAATCCGAAAATAACC | |
| | | (SEQ ID NO: 511) | |
| 3 | EGR4 | AGGGGGATTGAGTGTTAAGT | 293 |
| | (SEQ ID NO: 26) | (SEQ ID NO: 392) | |
| | | CCCAAACATAAACACAAAAT | |
| | | (SEQ ID NO: 391) | |
| 4 | AR | GTAGTAGTAGTAGTAAGAGA | 460 |
| | (SEQ ID NO: 69) | (SEQ ID NO: 532) | |
| | | ACCCCCTAAATAATTATCCT | |
| | | (SEQ ID NO: 531) | |
| 5 | CDK 4 | GGTAGTTGGTTATATGGTGAGG | 748 |
| | (SEQ ID NO: 70) | (SEQ ID NO: 395) | |
| | | TCACACTCTTTAAAAACCACAAAA | |
| | | (SEQ ID NO: 396) | |
| 6 | Humos | TGATTGGGAGTAGGTGTGTT | 523 |
| | (SEQ ID NO: 71) | (SEQ ID NO: 397) | |
| | | CAAATCTTCCAACTTCTCAAA | |
| | | (SEQ ID NO: 398) | |
| 7 | RB1 | TTTAAGTTTGTTTTTGTTTTGGT | 719 |
| | (SEQ ID NO: 52) | (SEQ ID NO: 399) | |
| | | TCCTACTCTAAATCCTCCTCAA | |
| | | (SEQ ID NO: 400) | |
| 8 | CDC25A | TTGGGAGTTTTTATTGATTTTT | 445 |
| | (SEQ ID NO: 72) | (SEQ ID NO: 401) | |
| | | ACAACCTAAAAATTAAATCCAAA | |
| | | (SEQ ID NO: 402) | |
| 9 | GPIb beta | GGTGATAGGAGAATAATGTTGG | 379 |
| | (SEQ ID NO: 30) | (SEQ ID NO: 403) | |
| | | TCTCCCAACTACAACCAAAC | |
| | | (SEQ ID NO: 404) | |
| 10 | MYOD1 | ATTAGGGGTATAGAGGAGTATTGA | 883 |
| | (SEQ ID NO: 45) | (SEQ ID NO: 405) | |
| | | CTTACAAACCCACAATAAACAA | |
| | | (SEQ ID NO: 406) | |
| 11 | CDH3 | GTTTAGAAGTTTAAGATTAG | 611 |
| | (SEQ ID NO: 17) | (SEQ ID NO: 407) | |
| | | CAAAAACTCAACCTCTATCT | |
| | | (SEQ ID NO: 408) | |
| 12 | WT1 | AAAGGGAAATTAAGTGTTGT | 747 |
| | (SEQ ID NO: 59) | (SEQ ID NO: 410) | |
| | | TAACTACCCTCAACTTCCC | |
| | | (SEQ ID NO: 409) | |
| 13 | MYCL1 | AGGTTTGGGTTATTGAGTTT | 491 |
| | (SEQ ID NO: 44) | (SEQ ID NO: 411) | |
| | | CATTATTTCCTAACTACCTTATATCTC | |
| | | (SEQ ID NO: 412) | |
| 14 | ABL1 | GGTTGGGAGATTTAATTTTATT | 967 |
| | (SEQ ID NO: 2) | (SEQ ID NO: 414) | |
| | | ACCAATCCAAACTTTTTCCTT | |
| | | (SEQ ID NO: 413) | |
| 15 | ELK1 | AAGTGTTTTAGTTTTTAATGGGTA | 966 |
| | (SEQ ID NO: 27) | (SEQ ID NO: 415) | |
| | | CAAACCCAAAACTCACCTAT | |
| | | (SEQ ID NO: 416) | |
| 16 | ABL1 | GTTAGGAGGGGGTTAAGG | 291 |
| | (SEQ ID NO: 1) | (SEQ ID NO: 417) | |
| | | CCAACTTCAAACAAATCTCC | |
| | | (SEQ ID NO: 418) | |
| 17 | APC | TCAACTACCATCAACTTCCTTA | |
| | (SEQ ID NO: 4) | (SEQ ID NO: 419) | |
| | | AATTTATTTTTAGTGTTGTAGTGGG | |
| | | (SEQ ID NO: 420) | |
| 18 | ARHI | GTGAGTTTTTGGGGTGTTTA | 444 |
| | (SEQ ID NO: 6) | (SEQ ID NO: 421) | |
| | | TCAATCTTACTTTCACACTACATAA | |
| | | (SEQ ID NO: 422) | |
| 19 | BCL2 | GTATTTTATGTTAAGGGGGAAA | 640 |
| | (SEQ ID NO: 9) | (SEQ ID NO: 423) | |
| | | AAAAACCACAATCCTCCC | |
| | | (SEQ ID NO: 424) | |
| 20 | CCND2 | TTTTGGTATGTAGGTTGGATG | 426 |
| | (SEQ ID NO: 13) | (SEQ ID NO: 425) | |
| | | CCTAACCTCCTTCCTTTAACT | |
| | | (SEQ ID NO: 426) | |
| 21 | CDH1 | CAAATAAACCCTCAACCAATC | 474 |
| | (SEQ ID NO: 16) | (SEQ ID NO: 427) | |
| | | TGGAGGGGGTAGGAAAGT | |
| | | (SEQ ID NO: 428) | |
| 22 | CDKN1A | GGATTAGTGGGAATAGAGGTG | 408 |
| | (SEQ ID NO: 19) | (SEQ ID NO: 429) | |
| | | AAACCCAAACTCCTAACTACC | |
| | | (SEQ ID NO: 430) | |
| 23 | CDKN1B | GTGGGGAGGTAGTTGAAGA | 478 |
| | (p27 Kip1) | (SEQ ID NO: 431) | |
| | (SEQ ID NO: 20) | ATACACCCCTAACCCAAAAT | |
| | | (SEQ ID NO: 432) | |
| 24 | CDKN2a | TTGAAAATTAAGGGTTGAGG | 598 |
| | (SEQ ID NO: 22) | (SEQ ID NO: 433) | |
| | | CACCCTCTAATAACCAACCA | |
| | | (SEQ ID NO: 434) | |
| 25 | CDKN2a | GGGGTTGGTTGGTTATTAGA | 256 |
| | (SEQ ID NO: 22) | (SEQ ID NO: 435) | |
| | | AACCCTCTACCCACCTAAAT | |
| | | (SEQ ID NO: 436) | |
| 26 | CDKN2B | GGTTGGTTGAAGGAATAGAAAT | 708 |
| | (SEQ ID NO: 23) | (SEQ ID NO: 437) | |
| | | CCCACTAAACATACCCTTATTC | |
| | | (SEQ ID NO: 438) | |
| 27 | DAPK1 | AACCCTTTCTTCAAATTACAAA | 348 |
| | (SEQ ID NO: 25) | (SEQ ID NO: 439) | |
| | | TGATTGGGTTTTAGGGAAATA | |
| | | (SEQ ID NO: 440) | |
| 28 | FOS | TTTTTGGGGTTTAGTTTAGAAT | 308 |
| | (SEQ ID NO: 29) | (SEQ ID NO: 441) | |
| | | AACCTTCATCCCCTAACCT | |
| | | (SEQ ID NO: 442) | |
| 29 | GSTP1 | ATTTGGGAAAGAGGGAAAG | 300 |
| | (SEQ ID NO: 33) | (SEQ ID NO: 443) | |
| | | TAAAAACTCTAAACCCCATCC | |
| | | (SEQ ID NO: 444) | |
| 30 | HIC-1 | TGGGTTGGAGAAGAAGTTTA | 280 |
| | (SEQ ID NO: 34) | (SEQ ID NO: 445) | |
| | | TCATATTTCCAAAAACACACC | |
| | | (SEQ ID NO: 446) | |
| 31 | IGF2 | CCCTTCCCCTTAACTAAACT | 364 |
| | (SEQ ID NO: 36) | (SEQ ID NO: 447) | |
| | | AATTTGGGTTAGGTTTGGA | |
| | | (SEQ ID NO: 448) | |
| 32 | MGMT | AAGGTTTTAGGGAAGAGTGTTT | 636 |
| | (SEQ ID NO: 38) | (SEQ ID NO: 449) | |
| | | ACCTTTTCCTATCACAAAAATAA | |
| | | (SEQ ID NO: 450) | |
| 33 | MLH1 | TAAGGGGAGAGGAGGAGTTT | 545 |
| | (SEQ ID NO: 39) | (SEQ ID NO: 451) | |
| | | ACCAATTCTCAATCATCTCTTT | |
| | | (SEQ ID NO: 452) | |
| 34 | MOS | ACCCTACAACAATCCCTCA | 343 |
| | (SEQ ID NO: 40) | (SEQ ID NO: 453) | |
| | | TGGTTTTTAGGTTATTGGATTT | |
| | | (SEQ ID NO: 454) | |
| 35 | MPL | TGGGGAGATTGATTTGAGTAT | 594 |
| | (SEQ ID NO: 42) | (SEQ ID NO: 455) | |
| | | AATTCCTTCAATAACATACCCTT | |
| | | (SEQ ID NO: 456) | |
| 36 | MYC | AGAGGGAGTAAAAGAAAATGGT | 712 |
| | (SEQ ID NO: 43) | (SEQ ID NO: 457) | |
| | | CCAAATAAACAAAATAACCTCC | |
| | | (SEQ ID NO: 458) | |
| 37 | N33 | TTTTAGATTGAGGTTTTAGGGT | 498 |
| | (SEQ ID NO: 46) | (SEQ ID NO: 459) | |
| | | ATCCATTCTACCTCCTTTTTCT | |
| | | (SEQ ID NO: 460) | |
| 38 | PMS2 | GATTGAGATTATTTTGGGTTTT | 561 |
| | (SEQ ID NO: 49) | (SEQ ID NO: 461) | |
| | | ACTTAAACCTTCCCTCTCCAC | |
| | | (SEQ ID NO: 462) | |
| 39 | PTEN | TTTTAGGTAGTTATATTGGGTATGTT | 346 |
| | (SEQ ID NO: 51) | (SEQ ID NO: 463) | |
| | | TCAACTCTCAAACTTCCATCA | |
| | | (SEQ ID NO: 464) | |
| 40 | RBL2 | GAAAATGGGTGTGTGTGG | 112 |
| | (SEQ ID NO: 53) | (SEQ ID NO: 465) | |
| | | TACAAATAAAAACAAATCCCCT | |
| | | (SEQ ID NO: 466) | |
| 41 | SFN | GAAGAGAGGAGAGGGAGGTA | 489 |
| | (SEQ ID NO: 55) | (SEQ ID NO: 468) | |
| | | CTATCCAACAAACCCAACA | |
| | | (SEQ ID NO: 467) | |
| 42 | TGFBR2 | GTAATTTGAAGAAAGTTGAGGG | 296 |
| | (SEQ ID NO: 57) | (SEQ ID NO: 469) | |
| | | CCAACAACTAAACAAAACCTCT | |
| | | (SEQ ID NO: 470) | |
| 43 | TP73 | AGTAAATAGTGGGTGAGTTATGAA | 607 |
| | (SEQ ID NO: 58) | (SEQ ID NO: 472) | |
| | | GAAAAACCTCTAAAAACTACTCTCC | |
| | | (SEQ ID NO: 471) | |
| 44 | CDKN1C | GGGGAGGTAGATATTTGGATAA | 300 |
| | (SEQ ID NO: 21) | (SEQ ID NO: 473) | |
| | | AACTACACCATTTATATTCCCAC | |
| | | (SEQ ID NO: 474) | |
| 45 | GSK3β | TAAGTGATAAAGGAAGGAAGGA | 243 |
| | (SEQ ID NO: 32) | (SEQ ID NO: 475) | |
| | | CCTTCAAACCCCAAACAA | |
| | | (SEQ ID NO: 476) | |
| 46 | CDC2 | ATTAGAAGTGAAAGTAATGGAATTT | 418 |
| | (SEQ ID NO: 14) | (SEQ ID NO: 477) | |
| | | TCAATTTCCAAAAACCAAC | |
| | | (SEQ ID NO: 478) | |
| 47 | ESR1 | AGGGGGAATTAAATAGAAAGAG | 662 |
| | (SEQ ID NO: 28) | (SEQ ID NO: 479) | |
| | | CAATAAAACCATCCCAAATACT | |
| | | (SEQ ID NO: 480) | |
| 48 | APAF1 | AGATATGTTTGGAGATTTTAGGA | 674 |
| | (SEQ ID NO: 3) | (SEQ ID NO: 481) | |
| | | AACTCCCCACCTCTAATTCTAT | |
| | | (SEQ ID NO: 482) | |
| 49 | BAK1 | AATTAGGGATGGGAAAAGTAGT | 558 |
| | (SEQ ID NO: 7) | (SEQ ID NO: 483) | |
| | | AAACATAACAAAATCAAATCCC | |
| | | (SEQ ID NO: 484) | |
| 50 | BAX | AAATAAATAGAAAAGTAGGTTTGGC | 716 |
| | (SEQ ID NO: 8) | (SEQ ID NO: 485) | |
| | | TTCTACCCCTCAATACTTAAAAA | |
| | | (SEQ ID NO: 486) | |
| 51 | CASP10 | TCTTCCCAAACAAATAAAAACT | 468 |
| | (SEQ ID NO: 10) | (SEQ ID NO: 487) | |
| | | GTTTTGAGGTTAAATGAGTGGT | |
| | | (SEQ ID NO: 488) | |
| 52 | CASP8 | AGTGGATTTGGAGTTTAGATGT | 431 |
| | (SEQ ID NO: 11) | (SEQ ID NO: 489) | |
| | | AACAAAATAAAAACTTGTCCCA | |
| | | (SEQ ID NO: 490) | |
| 53 | CASP9 | GGAAGAGTTGTAGGTGGATTAG | 424 |
| | (SEQ ID NO: 12) | (SEQ ID NO: 491) | |
| | | CCACATTTTCCCAATAAATACT | |
| | | (SEQ ID NO: 492) | |
| 54 | TCL1A | CCACAACACATCAAACCTATAA | 491 |
| | (SEQ ID NO: 56) | (SEQ ID NO: 493) | |
| | | TTTGGTGGTAAGTGAGGGT | |
| | | (SEQ ID NO: 494) | |
| 55 | PML | AATTCCCAAACAAACTTTTACA | 459 |
| | (SEQ ID NO: 48) | (SEQ ID NO: 495) | |
| | | TGGAGAGGAAGTGAGATAGAAG | |
| | | (SEQ ID NO: 496) | |
| 56 | HOXA5 | AAACCCCAAACAACCTCTAT | 392 |
| | (SEQ ID NO: 35) | (SEQ ID NO: 498) | |
| | | GAAGGGGGAAAGTTATTTAGTTA | |
| | | (SEQ ID NO: 497) | |
| 57 | SDC4 | CCTAACTACCCTCATTCCTTT | 269 |
| | (SEQ ID NO: 54) | (SEQ ID NO: 499) | |
| | | AGTTGGGGAAATTAAGGTTTAG | |
| | | (SEQ ID NO: 500) | |
| 58 | PITX2 | TCCTCAACTCTACAAACCTAAAA | 408 |
| | (SEQ ID NO: 47) | (SEQ ID NO: 501) | |
| | | GTAGGGGAGGGAAGTAGATGT | |
| | | (SEQ ID NO: 502) | |
| 59 | GPR37 | ACTTATTTTTCTTTTCCTCTAAAAAC | 489 |
| | (SEQ ID NO: 31) | (SEQ ID NO: 503) | |
| | | TATGGTTTGGTGAGGGTATATT | |
| | | (SEQ ID NO: 504) | |
| 60 | PRAME | ACCACTCAAAAACAAACCTTTA | 303 |
| | (SEQ ID NO: 50) | (SEQ ID NO: 505) | |
| | | ATGGGTATGGTGGTTAAGAGTA | |
| | | (SEQ ID NO: 506) | |
| 61 | CDK 4 | TTTTGGTAGTTGGTTATATG | 474 |
| | (SEQ ID NO: 70) | (SEQ ID NO: 508) | |
| | | AAAAATAACACAATAACTCA | |
| | | (SEQ ID NO: 507) | |
| 62 | CDC25A | AGAAGTTGTTTATTGATTGG | 272 |
| | (SEQ ID NO: 72) | (SEQ ID NO: 510) | |
| | | AAAATTAAATCCAAACAAAC | |
| | | (SEQ ID NO: 509) | |
| 63 | CSNK2B | GGGGAAATGGAGAAGTGTAA | 524 |
| | (SEQ ID NO: 67) | (SEQ ID NO: 512) | |
| | | CTACCAATCCCAAAATAACC | |
| | | (SEQ ID NO: 511) | |
| 64 | C-ABL | ATTTATTTTG | 568 |
| | (SEQ ID NO: 62) | (SEQ ID NO: 514) | |
| | | ATCCCAAACTAAAAAAAACAAACCACG | |
| | | (SEQ ID NO: 513) | |
| 65 | L-MYC | AAACCCAAAAACTAAAAAA | 461 |
| | (SEQ ID NO: 61) | (SEQ ID NO: 515) | |
| | | ATGTTATTTAGGTTTGGGTTATTG | |
| | | (SEQ ID NO: 516) | |
| 66 | CSF1 | GAGAATGGGGTGG | |
| | (SEQ ID NO: 65) | (SEQ ID NO: 518) | |
| | | TATAAAAAATCACCCTAACC | |
| | | (SEQ ID NO: 517) | |
| 67 | Me491/TD63 | ACCTAAATCA | |
| | (SEQ ID NO: 68) | (SEQ ID NO: 519) | |
| | | ATGTGAGTTAGGGATTTTTT | |
| | | (SEQ ID NO: 520) | |
| 68 | CD1R3 | ATTATGGTTGGAATTGTAAT | 413 |
| | (SEQ ID NO: 66) | (SEQ ID NO: 522) | |
| | | ACAAAAACAACAAACACCCC | |
| | | (SEQ ID NO: 521) | |
| 69 | N-MYC | GGGAGGAGTATATTTTG | 368 |
| | (SEQ ID NO: 60) | (SEQ ID NO: 524) | |
| | | AAAATATCCTC | |
| | | (SEQ ID NO: 523) | |
| 70 | Tubulin | CTTATATACCCTCCC | 453 |
| | (SEQ ID NO: 64) | (SEQ ID NO: 525) | |
| | | GGGTTTAGAGTTAAGATTG | |
| | | (SEQ ID NO: 526) | |
| 71 | CMYCex3 | AGGAGGAATAAGAAGATGAG | |
| | (SEQ ID NO: 73) | (SEQ ID NO: 528) | |
| | | TTCAATCTCAAAACTCAACC | |
| | | (SEQ ID NO: 527) | |
| 72 | ELK1 | GAAAAAAAAAAACCCAATAT | 523 |
| | (SEQ ID NO: 63) | (SEQ ID NO: 529) | |
| | | ATGGTTTTGTTTAAT | |
| | | (SEQ ID NO: 530) | |
| 73 | AR | GTAGTAGTAGTAGTAAGAGA | 460 |
| | (SEQ ID NO: 69) | (SEQ ID NO: 532) | |
| | | ACCCCCTAAATAATTATCCT | |
| | | (SEQ ID NO: 531) | |
| 74 | Humos | TTTATTGATTGGGAGTAGGT | 494 |
| | (SEQ ID NO: 71) | (SEQ ID NO: 534) | |
| | | CTAATTTTACAAACATCCTA | |
| | | (SEQ ID NO: 533) | |

[0116] TABLE 3

Hybridisation oligonucleotides

| | | |
|---|---|---|
| No: | Gene | Oligo: |

| | | |
|---|---|---|
| 1 | MDR1 | TTGGTGGTCGTTTTAAGG |
| | (SEQ ID NO: 37) | (SEQ ID NO: 535) |
| 2 | MDR1 | TTGGTGGTTGTTTTAAGG |
| | (SEQ ID NO: 37) | (SEQ ID NO: 536) |
| 3 | MDR1 | TTGAAAGACGTGTTTATA |
| | (SEQ ID NO: 37) | (SEQ ID NO: 537) |
| 4 | MDR1 | TTGAAAGATGTGTTTATA |
| | (SEQ ID NO: 37) | (SEQ ID NO: 538) |
| 5 | MDR1 | AGGTGTAACGGAAGTTAG |
| | (SEQ ID NO: 37) | (SEQ ID NO: 539) |
| 6 | MDR1 | AGGTGTAATGGAAGTTAG |
| | (SEQ ID NO: 37) | (SEQ ID NO: 540) |
| 7 | MDR1 | TAGTTTTCGAGGAATTA |
| | (SEQ ID NO: 37) | (SEQ ID NO: 541) |
| 8 | MDR1 | TAGTTTTTTGAGGAATTA |
| | (SEQ ID NO: 37) | (SEQ ID NO: 542) |
| 9 | CSNK2B | AGGAGTTTCGGAGGAAAT |
| | (SEQ ID NO: 67) | (SEQ ID NO: 1235) |
| 10 | CSNK2B | AGGAGTTTTGGAGGAAAT |
| | (SEQ ID NO: 67) | (SEQ ID NO: 1236) |
| 11 | CSNK2B | GAGAGTTGCGGAAAGAGA |
| | (SEQ ID NO: 67) | (SEQ ID NO: 543) |
| 12 | CSNK2B | GAGAGTTGTGGAAAGAGA |
| | (SEQ ID NO: 67) | (SEQ ID NO: 544) |
| 13 | CSNK2B | GGGTTTTCGTGATAGT |
| | (SEQ ID NO: 67) | (SEQ ID NO: 545) |
| 14 | CSNK2B | GGGTTTTTGTGATAGT |
| | (SEQ ID NO: 67) | (SEQ ID NO: 546) |
| 15 | CSNK2B | TAGGTTAGCGTATTGGGA |
| | (SEQ ID NO: 67) | (SEQ ID NO: 1117) |
| 16 | CSNK2B | TAGGTTAGTGTATTGGGA |
| | (SEQ ID NO: 67) | (SEQ ID NO: 1118) |
| 17 | EGR4 | GGTGGGAAGCGTATTTAT |
| | (SEQ ID NO: 26) | (SEQ ID NO: 1213) |
| 18 | EGR4 | GGTGGGAAGTGTATTTAT |
| | (SEQ ID NO: 26) | (SEQ ID NO: 1214) |
| 19 | EGR4 | AATAATAACGTTATAGTT |
| | (SEQ ID NO: 26) | (SEQ ID NO: 549) |
| 20 | EGR4 | AATAATAATGTTATAGTT |
| | (SEQ ID NO: 26) | (SEQ ID NO: 550) |
| 21 | EGR4 | TTATAGTTCGAGTTTTTT |
| | (SEQ ID NO: 26) | (SEQ ID NO: 1225) |
| 22 | EGR4 | TTATAGTTTGAGTTTTTT |
| | (SEQ ID NO: 26) | (SEQ ID NO: 1226) |
| 23 | EGR4 | GGAGTTTTCGGTATATAT |
| | (SEQ ID NO: 26) | (SEQ ID NO: 551) |
| 24 | EGR4 | GGAGTTTTTGGTATATAT |
| | (SEQ ID NO: 26) | (SEQ ID NO: 552) |
| 25 | AR | TGTTATTTCGAGAGAGGT |
| | (SEQ ID NO: 69) | (SEQ ID NO: 553) |
| 26 | AR | TGTTATTTTGAGAGAGGT |
| | (SEQ ID NO: 69) | (SEQ ID NO: 554) |
| 27 | AR | AGAGGTTGCGTTTTAGAG |
| | (SEQ ID NO: 69) | (SEQ ID NO: 555) |
| 28 | AR | AGAGGTTGTGTTTTAGAG |
| | (SEQ ID NO: 69) | (SEQ ID NO: 556) |
| 29 | AR | GTAGTATTCGAAGGTAGT |
| | (SEQ ID NO: 69) | (SEQ ID NO: 1255) |
| 30 | AR | GTAGTATTTGAAGGTAGT |
| | (SEQ ID NO: 69) | (SEQ ID NO: 1256) |
| 31 | AR | GGAGGTTTCGGGGGTTTT |
| | (SEQ ID NO: 69) | (SEQ ID NO: 557) |
| 32 | AR | GGAGGTTTTGGGGGTTTT |
| | (SEQ ID NO: 69) | (SEQ ID NO: 558) |
| 33 | CDK4 | GTATGGGGTCGTAGGAAT |
| | (SEQ ID NO: 70) | (SEQ ID NO: 559) |
| 34 | CDK4 | GTATGGGGTTGTAGGAAT |
| | (SEQ ID NO: 70) | (SEQ ID NO: 560) |
| 35 | CDK4 | GGAAGGGTCGTTTAAGGG |
| | (SEQ ID NO: 70) | (SEQ ID NO: 1147) |
| 36 | CDK4 | GGAAGGGTTGTTTAAGGG |
| | (SEQ ID NO: 70) | (SEQ ID NO: 1148) |
| 37 | CDK4 | GGGTTGGCGTGAGGTA |
| | (SEQ ID NO: 70) | (SEQ ID NO: 563) |
| 38 | CDK4 | GGGTTGGTGTGAGGTA |
| | (SEQ ID NO: 70) | (SEQ ID NO: 564) |
| 39 | CDK4 | AGGATTTTCGATGTAAGG |
| | (SEQ ID NO: 70) | (SEQ ID NO: 565) |
| 40 | CDK4 | AGGATTTTTGATGTAAGG |
| | (SEQ ID NO: 70) | (SEQ ID NO: 566) |
| 41 | CDK4 | GGGTTTTACGTGGTTGGA |
| | (SEQ ID NO: 70) | (SEQ ID NO: 567) |
| 42 | CDK4 | GGGTTTTATGTGGTTGGA |
| | (SEQ ID NO: 70) | (SEQ ID NO: 568) |
| 43 | Humos | GAGTTTAACGTAGTAAGG |
| | (SEQ ID NO: 71) | (SEQ ID NO: 1221) |
| 44 | Humos | GAGTTTAATGTAGTAAGG |
| | (SEQ ID NO: 71) | (SEQ ID NO: 1222) |
| 45 | Humos | TATGGAGTTCGGTGGTAA |
| | (SEQ ID NO: 71) | (SEQ ID NO: 569) |
| 46 | Humos | TATGGAGTTTGGTGGTAA |
| | (SEQ ID NO: 71) | (SEQ ID NO: 570) |
| 47 | Humos | TTTATTGTCGTATTGGAG |
| | (SEQ ID NO: 71) | (SEQ ID NO: 571) |
| 48 | Humos | TTTATTGTTGTATTGGAG |
| | (SEQ ID NO: 71) | (SEQ ID NO: 572) |
| 49 | Humos | GTTGTGAACGGTTTTGTTT |
| | (SEQ ID NO: 71) | (SEQ ID NO: 573) |
| 50 | Humos | GTTGTGAATGGTTTGTTT |
| | (SEQ ID NO: 71) | (SEQ ID NO: 574) |
| 51 | RB1 | TTAGATTTCGGGATAGGG |
| | (SEQ ID NO: 52) | (SEQ ID NO: 575) |
| 52 | RB1 | TTAGATTTTGGGATAGGG |
| | (SEQ ID NO: 52) | (SEQ ID NO: 576) |
| 53 | RB1 | TATAGTTTCGTTAAGTGT |
| | (SEQ ID NO: 52) | (SEQ ID NO: 577) |
| 54 | RB1 | TATAGTTTTGTTAAGTGT |
| | (SEQ ID NO: 52) | (SEQ ID NO: 578) |
| 55 | RB1 | GTGTATTTCGGTTTGGAG |
| | (SEQ ID NO: 52) | (SEQ ID NO: 579) |
| 56 | RB1 | GTGTATTTTGGTTTGGAG |
| | (SEQ ID NO: 52) | (SEQ ID NO: 580) |
| 57 | RB1 | TTGGAAGGCGTTTGGATT |
| | (SEQ ID NO: 52) | (SEQ ID NO: 581) |
| 58 | RB1 | TTGGAAGGTGTTTGGATT |
| | (SEQ ID NO: 52) | (SEQ ID NO: 582) |
| 59 | RB1 | TGGATTTACGTTAGGTTT |
| | (SEQ ID NO: 52) | (SEQ ID NO: 583) |
| 60 | RB1 | TGGATTTATGTTAGGTTT |
| | (SEQ ID NO: 52) | (SEQ ID NO: 584) |
| 61 | CDC25A | GTGTAGGTCGGTTTGGTT |
| | (SEQ ID NO: 72) | (SEQ ID NO: 1159) |
| 62 | CDC25A | GTGTAGGTTGGTTTGGTT |
| | (SEQ ID NO: 72) | (SEQ ID NO: 1160) |
| 63 | CDC25A | TTGTTATTCGGAGTTGGG |
| | (SEQ ID NO: 72) | (SEQ ID NO: 1163) |
| 64 | CDC25A | TTGTTATTTGGAGTTGGG |
| | (SEQ ID NO: 72) | (SEQ ID NO: 1164) |
| 65 | CDC25A | GGAGAATAGCGAAGATAG |
| | (SEQ ID NO: 72) | (SEQ ID NO: 589) |
| 66 | CDC25A | GGAGAATAGTGAAGATAG |
| | (SEQ ID NO: 72) | (SEQ ID NO: 590) |
| 67 | CDC25A | GAAAGGTCGGTTTGGT |
| | (SEQ ID NO: 72) | (SEQ ID NO: 591) |
| 68 | CDC25A | GAAAGGTTGGTTTGGT |
| | (SEQ ID NO: 72) | (SEQ ID NO: 592) |
| 69 | GPIb beta | TTTGAGAGCGGGTGGGAG |
| | (SEQ ID NO: 30) | (SEQ ID NO: 593) |
| 70 | GPIb beta | TTTGAGAGTGGGTGGGAG |
| | (SEQ ID NO: 30) | (SEQ ID NO: 594) |
| 71 | GPIb beta | GTGGGAGCGGAAGTTTGA |
| | (SEQ ID NO: 30) | (SEQ ID NO: 595) |
| 72 | GPIb beta | GTGGGAGTGGAAGTTTGA |
| | (SEQ ID NO: 30) | (SEQ ID NO: 596) |
| 73 | GPIb beta | GGTTAGGTCGTAGTATTG |
| | (SEQ ID NO: 30) | (SEQ ID NO: 597) |
| 74 | GPIb beta | GGTTAGGTTGTAGTATTG |
| | (SEQ ID NO: 30) | (SEQ ID NO: 598) |
| 75 | GPIb beta | ATGGGTTTCGGTGAGTTT |
| | (SEQ ID NO: 30) | (SEQ ID NO: 599) |
| 76 | GPIb beta | ATGGGTTTTGGTGAGTTT |
| | (SEQ ID NO: 30) | (SEQ ID NO: 600) |
| 77 | GPIb beta | GGGTTTTCGGTTGTTTTT |
| | (SEQ ID NO: 30) | (SEQ ID NO: 601) |
| 78 | GPIb beta | GGGTTTTCGGTTGTTTTT |
| | (SEQ ID NO: 30) | (SEQ ID NO: 602) |
| 79 | MYOD1 | ATAGTAGTCGGGTGTTGG |
| | (SEQ ID NO: 45) | (SEQ ID NO: 603) |
| 80 | MYOD1 | ATAGTAGTTGGGTGTTGG |
| | (SEQ ID NO: 45) | (SEQ ID NO: 604) |
| 81 | MYOD1 | GTGTTAGTCGTTTAGGGT |
| | (SEQ ID NO: 45) | (SEQ ID NO: 605) |
| 82 | MYOD1 | GTGTTAGTTGTTTAGGGT |
| | (SEQ ID NO: 45) | (SEQ ID NO: 606) |
| 83 | MYOD1 | TAGTTGTTCGTTTGGGTT |
| | (SEQ ID NO: 45) | (SEQ ID NO: 607) |
| 84 | MYOD1 | TAGTTGTTTGTTTGGGTT |
| | (SEQ ID NO: 45) | (SEQ ID NO: 608) |
| 85 | MYOD1 | GGTTATTACGGATAAATA |
| | (SEQ ID NO: 45) | (SEQ ID NO: 609) |
| 86 | MYOD1 | GGTTATTATGGATAAATA |
| | (SEQ ID NO: 45) | (SEQ ID NO: 610) |
| 87 | MYOD1 | AATTAGGTGGGATAGGAG |
| | (SEQ ID NO: 45) | (SEQ ID NO: 611) |
| 88 | MYOD1 | AATTAGGTTGGATAGGAG |
| | (SEQ ID NO: 45) | (SEQ ID NO: 612) |
| 89 | CDH3 | AAATTAGTCGGGTGTGGT |
| | (SEQ ID NO: 17) | (SEQ ID NO: 613) |
| 90 | CDH3 | AAATTAGTTGGGTGTGGT |
| | (SEQ ID NO: 17) | (SEQ ID NO: 614) |
| 91 | CDH3 | TGTGGTGGCGTAAGTTTG |
| | (SEQ ID NO: 17) | (SEQ ID NO: 615) |
| 92 | CDH3 | TGTGGTGGTGTAAGTTTG |
| | (SEQ ID NO: 17) | (SEQ ID NO: 616) |
| 93 | CDH3 | GGAGTTTTCGTTTTTAGT |
| | (SEQ ID NO: 17) | (SEQ ID NO: 617) |
| 94 | CDH3 | GGAGTTTTTGTTTTTAGT |
| | (SEQ ID NO: 17) | (SEQ ID NO: 618) |
| 95 | CDH3 | TAGAATTGCGAGATAGAG |
| | (SEQ ID NO: 17) | (SEQ ID NO: 619) |
| 96 | CDH3 | TAGAATTGTGAGATAGAG |
| | (SEQ ID NO: 17) | (SEQ ID NO: 620) |
| 97 | WT1 | TAGTGAGACGAGGTTTTT |
| | (SEQ ID NO: 59) | (SEQ ID NO: 621) |
| 98 | WT1 | TAGTGAGATGAGGTTTTT |
| | (SEQ ID NO: 59) | (SEQ ID NO: 622) |
| 99 | WT1 | TATATTGGCGAAGGTTAA |
| | (SEQ ID NO: 59) | (SEQ ID NO: 623) |
| 100 | WT1 | TATATTGGTGAAGGTTAA |
| | (SEQ ID NO: 59) | (SEQ ID NO: 624) |
| 101 | WT1 | TGTTATATCGGTTAGTTG |
| | (SEQ ID NO: 59) | (SEQ ID NO: 625) |
| 102 | WT1 | TGTTATATTGGTTAGTTG |
| | (SEQ ID NO: 59) | (SEQ ID NO: 626) |
| 103 | WT1 | TGTTTGGTCGGGTTTGGG |
| | (SEQ ID NO: 59) | (SEQ ID NO: 627) |
| 104 | WT1 | TGTTTGGTTGGGTTTGGG |
| | (SEQ ID NO: 59) | (SEQ ID NO: 628) |
| 105 | WT1 | TTTAGTTTCGATTTTTGG |
| | (SEQ ID NO: 59) | (SEQ ID NO: 629) |
| 106 | WT1 | TTTAGTTTTGATTTTTGG |
| | (SEQ ID NO: 59) | (SEQ ID NO: 630) |
| 107 | MYCL1 | TTGAGGGTCGTTAGGTGG |
| | (SEQ ID NO: 44) | (SEQ ID NO: 631) |
| 108 | MYCL1 | TTGAGGGTTGTTAGGTGG |
| | (SEQ ID NO: 44) | (SEQ ID NO: 632) |
| 109 | MYCL1 | TTTTAGTTCGGAGTGGGT |
| | (SEQ ID NO: 44) | (SEQ ID NO: 633) |
| 110 | MYCL1 | TTTTAGTTTGGAGTGGGT |
| | (SEQ ID NO: 44) | (SEQ ID NO: 634) |
| 111 | MYCL1 | AGTTTAGTCGGTTGGTAT |
| | (SEQ ID NO: 44) | (SEQ ID NO: 635) |
| 112 | MYCL1 | AGTTTAGTTGGTTGGTAT |
| | (SEQ ID NO: 44) | (SEQ ID NO: 636) |
| 113 | MYCL1 | GGGGTTATCGGGGATTTGA |
| | (SEQ ID NO: 44) | (SEQ ID NO: 637) |
| 114 | MYCL1 | GGGGTTATTGGGGATTGA |
| | (SEQ ID NO: 44) | (SEQ ID NO: 638) |
| 115 | ABL1 | GTTTGGGTCGCGAGAGTT |
| | (SEQ ID NO: 2) | (SEQ ID NO: 639) |
| 116 | ABL1 | GTTTGGGTTGTGAGAGTT |
| | (SEQ ID NO: 2) | (SEQ ID NO: 640) |
| 117 | ABL1 | GGATATTGCGGGTGGTTT |
| | (SEQ ID NO: 2) | (SEQ ID NO: 641) |
| 118 | ABL1 | GGATATTGTGGGTGGTTT |
| | (SEQ ID NO: 2) | (SEQ ID NO: 642) |
| 119 | ABL1 | TTTGGTTTCGTTGTGGAG |
| | (SEQ ID NO: 2) | (SEQ ID NO: 643) |
| 120 | ABL1 | TTTGGTTTTGTTGTGGAG |
| | (SEQ ID NO: 2) | (SEQ ID NO: 644) |
| 121 | ABL1 | GGGTTTTGGGGTTGAGGA |
| | (SEQ ID NO: 2) | (SEQ ID NO: 645) |
| 122 | ABL1 | GGGTTTTGTGGTTGAGGA |
| | (SEQ ID NO: 2) | (SEQ ID NO: 646) |
| 123 | ELK1 | TTTGTTTTCGTTGAGTAG |
| | (SEQ ID NO: 27) | (SEQ ID NO: 647) |
| 124 | ELK1 | TTTGTTTTTGTTGAGTAG |
| | (SEQ ID NO: 27) | (SEQ ID NO: 648) |
| 125 | ELK1 | TTTATTTTCGTTTTTGGG |
| | (SEQ ID NO: 27) | (SEQ ID NO: 649) |
| 126 | ELK1 | TTTATTTTTGTTTTTGGG |
| | (SEQ ID NO: 27) | (SEQ ID NO: 650) |
| 127 | ELK1 | GAAGGGTTGGTTTTTTAA |
| | (SEQ ID NO: 27) | (SEQ ID NO: 651) |
| 128 | ELK1 | GAAGGGTTTGTTTTTTAA |
| | (SEQ ID NO: 27) | (SEQ ID NO: 652) |
| 129 | APC | TATTAGAGGGTTTTAAAG |
| | (SEQ ID NO: 4) | (SEQ ID NO: 653) |
| 130 | APC | TATTAGAGTGTTTTAAAG |
| | (SEQ ID NO: 4) | (SEQ ID NO: 654) |
| 131 | APC | GTTTTTTTCGATTTGGGT |
| | (SEQ ID NO: 4) | (SEQ ID NO: 655) |
| 132 | APC | GTTTTTTTTGATTTGGGT |
| | (SEQ ID NO: 4) | (SEQ ID NO: 656) |
| 133 | ARHI | TGTTGTTGCGTAGTAGAA |
| | (SEQ ID NO: 6) | (SEQ ID NO: 657) |
| 134 | ARHI | TGTTGTTGTGTAGTAGAA |
| | (SEQ ID NO: 6) | (SEQ ID NO: 658) |
| 135 | ARHI | GAATTATTCGTAGTTTTG |
| | (SEQ ID NO: 6) | (SEQ ID NO: 659) |
| 136 | ARHI | GAATTATTTGTAGTTTTG |
| | (SEQ ID NO: 6) | (SEQ ID NO: 660) |
| 137 | ARHI | GATAGTTTCGTTGGGAAG |
| | (SEQ ID NO: 6) | (SEQ ID NO: 661) |
| 138 | ARHI | GATAGTTTTGTTGGGAAG |
| | (SEQ ID NO: 6) | (SEQ ID NO: 662) |
| 139 | ARHI | TAGAAGAACGAGGTTTGA |
| | (SEQ ID NO: 6) | (SEQ ID NO: 663) |
| 140 | ARHI | TAGAAGAATGAGGTTTGA |
| | (SEQ ID NO: 6) | (SEQ ID NO: 664) |
| 141 | ARHI | TATAGTTGCGTAGGTAGT |
| | (SEQ ID NO: 6) | (SEQ ID NO: 665) |
| 142 | ARHI | TATAGTTGTGTAGGTAGT |
| | (SEQ ID NO: 6) | (SEQ ID NO: 666) |
| 143 | BCL2 | AGAGGTGTCGTTGGTTTT |
| | (SEQ ID NO: 9) | (SEQ ID NO: 667) |
| 144 | BCL2 | AGAGGTGTTGTTGGTTTT |
| | (SEQ ID NO: 9) | (SEQ ID NO: 668) |
| 145 | BCL2 | TAAGTTGTCGTAGAGGGG |
| | (SEQ ID NO: 9) | (SEQ ID NO: 669) |
| 146 | BCL2 | TAAGTTGTTGTAGAGGGG |
| | (SEQ ID NO: 9) | (SEQ ID NO: 670) |
| 147 | BCL2 | AGGGGTTACGAGTGGGAT |
| | (SEQ ID NO: 9) | (SEQ ID NO: 671) |
| 148 | BCL2 | AGGGGTTATGAGTGGGAT |
| | (SEQ ID NO: 9) | (SEQ ID NO: 672) |
| 149 | BCL2 | TTTGTTACGGTGGTGGA |
| | (SEQ ID NO: 9) | (SEQ ID NO: 673) |
| 150 | BCL2 | TTTTGTTATGGTGGTGGA |
| | (SEQ ID NO: 9) | (SEQ ID NO: 674) |
| 151 | CCND2 | AGTTGGGTCGGGTTAGTT |
| | (SEQ ID NO: 13) | (SEQ ID NO: 675) |
| 152 | CCND2 | AGTTGGGTTGGGTTAGTT |
| | (SEQ ID NO: 13) | (SEQ ID NO: 676) |
| 153 | CCND2 | TTTAATAACGAGAGGGGA |
| | (SEQ ID NO: 13) | (SEQ ID NO: 677) |
| 154 | CCND2 | TTTAATAATGAGAGGGGA |
| | (SEQ ID NO: 13) | (SEQ ID NO: 678) |
| 155 | CCND2 | TTAGTTTGCGTTATCGTT |
| | (SEQ ID NO: 13) | (SEQ ID NO: 679) |
| 156 | CCND2 | TTAGTTTGTGTTATTGTT |
| | (SEQ ID NO: 13) | (SEQ ID NO: 680) |
| 157 | CCND2 | TTTTAGAGCGGAGAAGAG |
| | (SEQ ID NO: 13) | (SEQ ID NO: 681) |
| 158 | CCND2 | TTTTAGAGTGGAGAAGAG |
| | (SEQ ID NO: 13) | (SEQ ID NO: 682) |
| 159 | CCND2 | GGTAGTTTCGAGGTTTTG |
| | (SEQ ID NO: 13) | (SEQ ID NO: 683) |
| 160 | CCND2 | GGTAGTTTTGAGGTTTTG |
| | (SEQ ID NO: 13) | (SEQ ID NO: 684) |
| 161 | CDH1 | AGTTTCGACGTTATTGAG |
| | (SEQ ID NO: 16) | (SEQ ID NO: 685) |
| 162 | CDH1 | AGTTTTGATGTTATTGAG |
| | (SEQ ID NO: 16) | (SEQ ID NO: 686) |
| 163 | CDH1 | AGAGGTTGCGGTTTTAAG |
| | (SEQ ID NO: 16) | (SEQ ID NO: 687) |
| 164 | CDH1 | AGAGGTTGTGGTTTTAAG |
| | (SEQ ID NO: 16) | (SEQ ID NO: 688) |
| 165 | CDH1 | AGTAGCGTCGAGAGGTTG |
| | (SEQ ID NO: 16) | (SEQ ID NO: 689) |
| 166 | CDH1 | AGTAGTGTTGAGAGGTTG |
| | (SEQ ID NO: 16) | (SEQ ID NO: 690) |
| 167 | CDH1 | AGGGGATTCGGGGTATTT |
| | (SEQ ID NO: 16) | (SEQ ID NO: 691) |
| 168 | CDH1 | AGGGGATTTGGGGTATTT |
| | (SEQ ID NO: 16) | (SEQ ID NO: 692) |
| 169 | CDKN1A | AGGTGTATCGTTTTTATA |
| | (SEQ ID NO: 19) | (SEQ ID NO: 693) |
| 170 | CDKN1A | AGGTGTATTGTTTTTATA |
| | (SEQ ID NO: 19) | (SEQ ID NO: 694) |
| 171 | CDKN1A | TGGGTTAGCGGTGAGTTA |
| | (SEQ ID NO: 19) | (SEQ ID NO: 695) |
| 172 | CDKN1A | TGGGTTAGTGGTGAGTTA |
| | (SEQ ID NO: 19) | (SEQ ID NO: 696) |
| 173 | CDKN1A | GTTTATTTCGTGGGGAAA |
| | (SEQ ID NO: 19) | (SEQ ID NO: 697) |
| 174 | CDKN1A | GTTTATTTTGTGGGGAAA |
| | (SEQ ID NO: 19) | (SEQ ID NO: 698) |
| 175 | CDKN1A | TTGGAATTCGGTTAGGTT |
| | (SEQ ID NO: 19) | (SEQ ID NO: 699) |
| 176 | CDKN1A | TTGGAATTTGGTTAGGTT |
| | (SEQ ID NO: 19) | (SEQ ID NO: 700) |
| 177 | CDKN1B | AAGAGAAACGTTGGAATA |
| | (p27 Kip1) | (SEQ ID NO: 701) |
| | (SEQ ID NO: 20) | |
| 178 | CDKN1B | AAGAGAAATGTTGGAATA |
| | (p27 Kip1) | (SEQ ID NO: 702) |
| | (SEQ ID NO: 20) | |
| 179 | CDKN1B | TTTGATTTCGAGGGGAGT |
| | (p27 Kip1) | (SEQ ID NO: 703) |
| | (SEQ ID NO: 20) | |
| 180 | CDKN1B | TTTGATTTTGAGGGGAGT |
| | (p27 Kip1) | (SEQ ID NO: 704) |
| | (SEQ ID NO: 20) | |
| 181 | CDKN1B | GTATTTGGCGGTTGGATT |
| | (p27 Kip1) | (SEQ ID NO: 705) |
| | (SEQ ID NO: 20) | |
| 182 | CDKN1B | GTATTTGGTGGTTGGATT |
| | (p27 Kip1) | (SEQ ID NO: 706) |
| | (SEQ ID NO: 20) | |
| 183 | CDKN1B | TATAATTTCGGGAAAGAA |
| | (p27 Kip1) | (SEQ ID NO: 707) |
| | (SEQ ID NO: 20) | |
| 184 | CDKN1B | TATAATTTTGGGAAAGAA |
| | (p27 Kip1) | (SEQ ID NO: 708) |
| | (SEQ ID NO: 20) | |
| 185 | CDKN2a | AGAGTGAACGTATTTAAA |
| | (SEQ ID NO: 22) | (SEQ ID NO: 709) |
| 186 | CDKN2a | AGAGTGAATGTATTTAAA |
| | (SEQ ID NO: 22) | (SEQ ID NO: 710) |
| 187 | CDKN2a | GTTATATTCGTTAAGTGT |
| | (SEQ ID NO: 22) | (SEQ ID NO: 711) |
| 188 | CDKN2a | GTTATATTTGTTAAGTGT |
| | (SEQ ID NO: 22) | (SEQ ID NO: 712) |
| 189 | CDKN2a | TAAGTGTTCGGAGTTAAT |
| | (SEQ ID NO: 22) | (SEQ ID NO: 713) |
| 190 | CDKN2a | TAAGTGTTTGGAGTTAAT |
| | (SEQ ID NO: 22) | (SEQ ID NO: 714) |
| 191 | CDKN2a | GTTAGTATCGGAGGAAGA |
| | (SEQ ID NO: 22) | (SEQ ID NO: 715) |
| 192 | CDKN2a | GTTAGTATTGGAGGAAGA |
| | (SEQ ID NO: 22) | (SEQ ID NO: 716) |
| 193 | CDKN2a | GGAGTTTTCGGTTGATTG |
| | (SEQ ID NO: 22) | (SEQ ID NO: 717) |
| 194 | CDKN2a | GGAGTTTTTGGTTGATTG |
| | (SEQ ID NO: 22) | (SEQ ID NO: 718) |
| 195 | CDKN2a | TTGTTTAACGTATCGAAT |
| | (SEQ ID NO: 22) | (SEQ ID NO: 719) |
| 196 | CDKN2a | TTGTTTAATGTATTGAAT |
| | (SEQ ID NO: 22) | (SEQ ID NO: 720) |
| 197 | CDKN2a | AATAGTTACGGTCGGAGG |
| | (SEQ ID NO: 22) | (SEQ ID NO: 721) |
| 198 | CDKN2a | AATAGTTATGGTTGGAGG |
| | (SEQ ID NO: 22) | (SEQ ID NO: 722) |
| 199 | CDKN2B | ATATTTAGCGAGTAGTGT |
| | (SEQ ID NO: 23) | (SEQ ID NO: 723) |
| 200 | CDKN2B | ATATTTAGTGAGTAGTGT |
| | (SEQ ID NO: 23) | (SEQ ID NO: 724) |
| 201 | CDKN2B | ATAGGGGGCGGAGTTTAA |
| | (SEQ ID NO: 23) | (SEQ ID NO: 725) |
| 202 | CDKN2B | ATAGGGGGTGGAGTTTAA |
| | (SEQ ID NO: 23) | (SEQ ID NO: 726) |
| 203 | CDKN2B | TTATTGTACGGGGTTTTA |
| | (SEQ ID NO: 23) | (SEQ ID NO: 727) |
| 204 | CDKN2B | TTATTGTATGGGGTTTTA |
| | (SEQ ID NO: 23) | (SEQ ID NO: 728) |
| 205 | CDKN2B | TTTTAAGTCGTAGAAGGA |
| | (SEQ ID NO: 23) | (SEQ ID NO: 729) |
| 206 | CDKN2B | TTTTAAGTTGTAGAAGGA |
| | (SEQ ID NO: 23) | (SEQ ID NO: 730) |
| 207 | DAPK1 | GTTGGAGTCGAGGTTTGA |
| | (SEQ ID NO: 25) | (SEQ ID NO: 731) |
| 208 | DAPK1 | GTTGGAGTTGAGGTTTGA |
| | (SEQ ID NO: 25) | (SEQ ID NO: 732) |
| 209 | DAPK1 | GAAGGGAGCGTATTTTAT |
| | (SEQ ID NO: 25) | (SEQ ID NO: 733) |
| 210 | DAPK1 | GAAGGGAGTGTATTTTAT |
| | (SEQ ID NO: 25) | (SEQ ID NO: 734) |
| 211 | DAPK1 | TTGTTTTTCGGAAATTTG |
| | (SEQ ID NO: 25) | (SEQ ID NO: 735) |
| 212 | DAPK1 | TTGTTTTTTGGAAATTTG |
| | (SEQ ID NO: 25) | (SEQ ID NO: 736) |
| 213 | FOS | AATGTTTTCGTACGTAGG |
| | (SEQ ID NO: 29) | (SEQ ID NO: 737) |
| 214 | FOS | AATGTTTTTGTATGTAGG |
| | (SEQ ID NO: 29) | (SEQ ID NO: 738) |
| 215 | FOS | TATATGGTCGAGAAAAAT |
| | (SEQ ID NO: 29) | (SEQ ID NO: 739) |
| 216 | FOS | TATATGGTTGAGAAAAAT |
| | (SEQ ID NO: 29) | (SEQ ID NO: 740) |
| 217 | FOS | TTTAGTATCGTAAAGTAG |
| | (SEQ ID NO: 29) | (SEQ ID NO: 741) |
| 218 | FOS | TTTAGTATTGTAAAGTAG |
| | (SEQ ID NO: 29) | (SEQ ID NO: 742) |
| 219 | FOS | GTATTGTTCGAGTTCGAG |
| | (SEQ ID NO: 29) | (SEQ ID NO: 743) |
| 220 | FOS | GTATTGTTTGAGTTTGAG |
| | (SEQ ID NO: 29) | (SEQ ID NO: 744) |
| 221 | GSTP1 | GGTTTTTTCGGTTAGTTG |
| | (SEQ ID NO: 33) | (SEQ ID NO: 745) |
| 222 | GSTP1 | GGTTTTTTCGGTTAGTTG |
| | (SEQ ID NO: 33) | (SEQ ID NO: 746) |
| 223 | GSTP1 | TTTTAGGGCGTTTTTTTG |
| | (SEQ ID NO: 33) | (SEQ ID NO: 747) |
| 224 | GSTP1 | TTTTAGGGTGTTTTTTTG |
| | (SEQ ID NO: 33) | (SEQ ID NO: 748) |
| 225 | GSTP1 | GTAGTTTTCGTTATTAGT |
| | (SEQ ID NO: 33) | (SEQ ID NO: 749) |
| 226 | GSTP1 | GTAGTTTTTGTTATTAGT |
| | (SEQ ID NO: 33) | (SEQ ID NO: 750) |
| 227 | HIC-1 | TTAAAAGGGGGTATAGGG |
| | (SEQ ID NO: 34) | (SEQ ID NO: 751) |
| 228 | HIC-1 | TTAAAATGGTGTATAGGG |
| | (SEQ ID NO: 34) | (SEQ ID NO: 752) |
| 229 | HIC-1 | AGGAGATTGGAAAGTTTA |
| | (SEQ ID NO: 34) | (SEQ ID NO: 753) |
| 230 | HIC-1 | AGGAGATTTGAAAGTTTA |
| | (SEQ ID NO: 34) | (SEQ ID NO: 754) |
| 231 | HIC-1 | GGGTTTTTACGTGGTTGTT |
| | (SEQ ID NO: 34) | (SEQ ID NO: 755) |
| 232 | HIC-1 | GGGTTTTATGTGGTTGTT |
| | (SEQ ID NO: 34) | (SEQ ID NO: 756) |
| 233 | HIC-1 | TTTTAGAGCGTTAGGGTT |
| | (SEQ ID NO: 34) | (SEQ ID NO: 757) |
| 234 | HIC-1 | TTTTAGAGTGTTAGGGTT |
| | (SEQ ID NO: 34) | (SEQ ID NO: 758) |
| 235 | IGF2 | AGTTTGAACGATGTAAGA |
| | (SEQ ID NO: 36) | (SEQ ID NO: 759) |
| 236 | IGF2 | AGTTTGAATGATGTAAGA |
| | (SEQ ID NO: 36) | (SEQ TD NO: 760) |
| 237 | IGF2 | GGTTATTAGGATAATTTG |
| | (SEQ ID NO: 36) | (SEQ ID NO: 761) |
| 238 | IGF2 | GGTTATTATGATAATTTG |
| | (SEQ ID NO: 36) | (SEQ ID NO: 762) |
| 239 | IGF2 | TTGTATGGTGGAGTTTAT |
| | (SEQ ID NO: 36) | (SEQ ID NO: 763) |
| 240 | IGF2 | TTGTATGGTTGAGTTTAT |
| | (SEQ ID NO: 36) | (SEQ ID NO: 764) |
| 241 | IGF2 | GATTAGGGCGGGAAATAT |
| | (SEQ ID NO: 36) | (SEQ ID NO: 765) |
| 242 | IGF2 | GATTAGGGTGGGAAATAT |
| | (SEQ ID NO: 36) | (SEQ ID NO: 766) |
| 243 | IGF2 | TGGAGTTTAGGGAGGTTT |
| | (SEQ ID NO: 36) | (SEQ ID NO: 767) |
| 244 | IGF2 | TGGAGTTTATGGAGGTTT |
| | (SEQ ID NO: 36) | (SEQ ID NO: 768) |
| 245 | MGMT | TAAGGATACGAGTTATAT |
| | (SEQ ID NO: 38) | (SEQ ID NO: 769) |
| 246 | MGMT | TAAGGATATGAGTTATAT |
| | (SEQ ID NO: 38) | (SEQ ID NO: 770) |
| 247 | MGMT | TTGGAGAGCGGTTGAGTT |
| | (SEQ ID NO: 38) | (SEQ ID NO: 771) |
| 248 | MGMT | TTGGAGAGTGGTTGAGTT |
| | (SEQ ID NO: 38) | (SEQ ID NO: 772) |
| 249 | MGMT | TAGGTTATCGGTGATTGT |
| | (SEQ ID NO: 38) | (SEQ ID NO: 773) |
| 250 | MGMT | TAGGTTATTGGTGATTGT |
| | (SEQ ID NO: 38) | (SEQ ID NO: 774) |
| 251 | MGMT | TAGGGGAGCGGTTTTAGG |
| | (SEQ ID NO: 38) | (SEQ ID NO: 775) |
| 252 | MGMT | TAGGGGAGTGGTTTTAGG |
| | (SEQ ID NO: 38) | (SEQ ID NO: 776) |
| 253 | MGMT | AGTAGGATCGGGATTTTT |
| | (SEQ ID NO: 38) | (SEQ ID NO: 777) |
| 254 | MGMT | AGTAGGATTGGGATTTTT |
| | (SEQ ID NO: 38) | (SEQ ID NO: 778) |
| 255 | MLH1 | TTGAGAAGCGTTAAGTAT |
| | (SEQ ID NO: 39) | (SEQ ID NO: 779) |
| 256 | MLH1 | TTGAGAAGTGTTAAGTAT |
| | (SEQ ID NO: 39) | (SEQ ID NO: 780) |
| 257 | MLH1 | TTAGGTAGCGGGTAGTAG |
| | (SEQ ID NO: 39) | (SEQ ID NO: 781) |
| 258 | MLH1 | TTAGGTAGTGGGTAGTAG |
| | (SEQ ID NO: 39) | (SEQ ID NO: 782) |
| 259 | MLH1 | GTAGTAGTCGTTTTAGGG |
| | (SEQ ID NO: 39) | (SEQ ID NO: 783) |
| 260 | MLH1 | GTAGTAGTTGTTTTAGGG |
| | (SEQ ID NO: 39) | (SEQ ID NO: 784) |
| 261 | MLH1 | ATAGTTGTCGTTGAAGGG |
| | (SEQ ID NO: 39) | (SEQ ID NO: 785) |
| 262 | MLH1 | ATAGTTGTTGTTGAAGGG |
| | (SEQ ID NO: 39) | (SEQ ID NO: 786) |
| 263 | MLH1 | TTGGATGGCGTAAGTTAT |
| | (SEQ ID NO: 39) | (SEQ ID NO: 787) |
| 264 | MLH1 | TTGGATGGTGTAAGTTAT |
| | (SEQ ID NO: 39) | (SEQ ID NO: 788) |
| 265 | MOS | AGTAGTTTCGTAGGTAGT |
| | (SEQ ID NO: 40) | (SEQ ID NO: 789) |
| 266 | MOS | AGTAGTTTTGTAGGTAGT |
| | (SEQ ID NO: 40) | (SEQ ID NO: 790) |
| 267 | MOS | GTAAGTCGTTTTGTATAT |
| | (SEQ ID NO: 40) | (SEQ ID NO: 791) |
| 268 | MOS | GTAAGTTGTTTTGTATAT |
| | (SEQ ID NO: 40) | (SEQ ID NO: 792) |
| 269 | MOS | ATGTTAGTCGGTTTTTGG |
| | (SEQ ID NO: 40) | (SEQ ID NO: 793) |
| 270 | MOS | ATGTTAGTTGGTTTTTGG |
| | (SEQ ID NO: 40) | (SEQ ID NO: 794) |
| 271 | MPL | GTGGTGGGCGTTTGTAAT |
| | (SEQ ID NO: 42) | (SEQ ID NO: 795) |
| 272 | MPL | GTGGTGGGTGTTTGTAAT |
| | (SEQ ID NO: 42) | (SEQ ID NO: 796) |
| 273 | MPL | TTTGAGGTCGGGAGTTTA |
| | (SEQ ID NO: 42) | (SEQ ID NO: 797) |
| 274 | MPL | TTTGAGGTTGGGAGTTTA |
| | (SEQ ID NO: 42) | (SEQ ID NO: 798) |
| 275 | MPL | TGTAGTGAGTCGAGATTA |
| | (SEQ ID NO: 42) | (SEQ ID NO: 1227) |
| 276 | MPL | TGTAGTGAGTTGAGATTA |
| | (SEQ ID NO: 42) | (SEQ ID NO: 1228) |
| 277 | MPL | GGTAATAGAGCGAGATTT |
| | (SEQ ID NO: 42) | (SEQ ID NO: 799) |
| 278 | MPL | GGTAATAGAGTGAGATTT |
| | (SEQ ID NO: 42) | (SEQ ID NO: 800) |
| 279 | MPL | TTAAGTAGCGGGTAAGGT |
| | (SEQ ID NO: 42) | (SEQ ID NO: 801) |
| 280 | MPL | TTAAGTAGTGGGTAAGGT |
| | (SEQ ID NO: 42) | (SEQ ID NO: 802) |
| 281 | MYC | TTAGAGTGTTCGGTTGTT |
| | (SEQ ID NO: 43) | (SEQ ID NO: 803) |
| 282 | MYC | TTAGAGTGTTTGGTTGTT |
| | (SEQ ID NO: 43) | (SEQ ID NO: 804) |
| 283 | MYC | TTATAATGCGAGGGTTTG |
| | (SEQ ID NO: 43) | (SEQ ID NO: 805) |
| 284 | MYC | TTATAATGTGAGGGTTTG |
| | (SEQ ID NO: 43) | (SEQ ID NO: 806) |
| 285 | MYC | AGGATTTTCGAGTTGTGT |
| | (SEQ ID NO: 43) | (SEQ ID NO: 807) |
| 286 | MYC | AGGATTTTTGAGTTGTGT |
| | (SEQ ID NO: 43) | (SEQ ID NO: 808) |
| 287 | MYC | AATTTTAGCGAGAGGTAG |
| | (SEQ ID NO: 43) | (SEQ ID NO: 809) |
| 288 | MYC | AATTTTAGTGAGAGGTAG |
| | (SEQ ID NO: 43) | (SEQ ID NO: 810) |
| 289 | MYC | TTGTGGGCGTTTTGGGAA |
| | (SEQ ID NO: 43) | (SEQ ID NO: 811) |
| 290 | MYC | TTGTGGGTGTTTTGGGAA |
| | (SEQ ID NO: 43) | (SEQ ID NO: 812) |
| 291 | N33 | TTGGTTCGGGAAAGGTAA |
| | (SEQ ID NO: 46) | (SEQ ID NO: 1211) |
| 292 | N33 | TTGGTTTGGGAAAGGTAA |
| | (SEQ ID NO: 46) | (SEQ ID NO: 1212) |
| 293 | N33 | TGTTATTTCGGAGGGTTT |
| | (SEQ ID NO: 46) | (SEQ ID NO: 1217) |
| 294 | N33 | TGTTATTTTGGAGGGTTT |
| | (SEQ ID NO: 46) | (SEQ ID NO: 1218) |
| 295 | N33 | GTTTAGTTAGCGGGTTTT |
| | (SEQ ID NO: 46) | (SEQ ID NO: 1219) |
| 296 | N33 | GTTTAGTTAGTGGGTTTT |
| | (SEQ ID NO: 46) | (SEQ ID NO: 1220) |
| 297 | N33 | ATTTAGTTCGGGGGAGGA |
| | (SEQ ID NO: 46) | (SEQ ID NO: 1215) |
| 298 | N33 | ATTTAGTTTGGGGGAGGA |
| | (SEQ ID NO: 46) | (SEQ ID NO: 1216) |
| 299 | PMS2 | AGATTATACGTTGTATGT |
| | (SEQ ID NO: 49) | (SEQ ID NO: 813) |
| 300 | PMS2 | AGATTATATGTTGTATGT |
| | (SEQ ID NO: 49) | (SEQ ID NO: 814) |
| 301 | PMS2 | TAGGAGTTCGAGATTAGT |
| | (SEQ ID NO: 49) | (SEQ ID NO: 815) |
| 302 | PMS2 | TAGGAGTTTGAGATTAGT |
| | (SEQ ID NO: 49) | (SEQ ID NO: 816) |
| 303 | PMS2 | AAATTAGTCGGGTTTAGT |
| | (SEQ ID NO: 49) | (SEQ ID NO: 817) |
| 304 | PMS2 | AAATTAGTTGGGTTTAGT |
| | (SEQ ID NO: 49) | (SEQ ID NO: 818) |
| 305 | PMS2 | GTGGATAGCGTTTGTAAT |
| | (SEQ ID NO: 49) | (SEQ ID NO: 819) |
| 306 | PMS2 | GTGGATAGTGTTTGTAAT |
| | (SEQ ID NO: 49) | (SEQ ID NO: 820) |
| 307 | PTEN | GGATTTTGCGTTCGTATT |
| | (SEQ ID NO: 51) | (SEQ ID NO: 821) |
| 308 | PTEN | GGATTTTGTGTTTGTATT |
| | (SEQ ID NO: 51) | (SEQ ID NO: 822) |
| 309 | PTEN | AGAGTTATCGTTTTGTTT |
| | (SEQ ID NO: 51) | (SEQ ID NO: 823) |
| 310 | PTEN | AGAGTTATTGTTTTGTTT |
| | (SEQ ID NO: 51) | (SEQ ID NO: 824) |
| 311 | PTEN | TGATGTGGCGGGATTTTT |
| | (SEQ ID NO: 51) | (SEQ ID NO: 825) |
| 312 | PTEN | TGATGTGGTGGGATTTTT |
| | (SEQ ID NO: 51) | (SEQ ID NO: 826) |
| 313 | RBL2 | ATTAGTGTCGTTGTTAAG |
| | (SEQ ID NO: 53) | (SEQ ID NO: 827) |
| 314 | RBL2 | ATTAGTGTTGTTGTTAAG |
| | (SEQ ID NO: 53) | (SEQ ID NO: 828) |
| 315 | RBL2 | AGATTATACGGATAAGGG |
| | (SEQ ID NO: 53) | (SEQ ID NO: 829) |
| 316 | RBL2 | AGATTATATGGATAAGGG |
| | (SEQ ID NO: 53) | (SEQ ID NO: 830) |
| 317 | SFN | ATAGAGTTCGGTATTGGT |
| | (SEQ ID NO: 55) | (SEQ ID NO: 831) |
| 318 | SFN | ATAGAGTTTGGTATTGGT |
| | (SEQ ID NO: 55) | (SEQ ID NO: 832) |
| 319 | SFN | GAGTAGGTCGAACGTTAT |
| | (SEQ ID NO: 55) | (SEQ ID NO: 833) |
| 320 | SFN | GAGTAGGTTGAATGTTAT |
| | (SEQ ID NO: 55) | (SEQ ID NO: 834) |
| 321 | SFN | AAAAGTAACGAGGAGGGT |
| | (SEQ ID NO: 55) | (SEQ ID NO: 835) |
| 322 | SFN | AAAAGTAATGAGGAGGGT |
| | (SEQ ID NO: 55) | (SEQ ID NO: 836) |
| 323 | TGFBR2 | ATTTGGAGCGAGGAATTT |
| | (SEQ ID NO: 57) | (SEQ ID NO: 837) |
| 324 | TGFBR2 | ATTTGGAGTGAGGAATTT |
| | (SEQ ID NO: 57) | (SEQ ID NO: 838) |
| 325 | TGFBR2 | TTGAAAGTCGGTTAAAGT |
| | (SEQ ID NO: 57) | (SEQ ID NO: 839) |
| 326 | TGFBR2 | TTGAAAGTTGGTTAAAGT |
| | (SEQ ID NO: 57) | (SEQ ID NO: 840) |
| 327 | TGFBR2 | AAAGTTTTCGGAGGGGTT |
| | (SEQ ID NO: 57) | (SEQ ID NO: 841) |
| 328 | TGFBR2 | AAAGTTTTTGGAGGGGTT |
| | (SEQ ID NO: 57) | (SEQ ID NO: 842) |
| 329 | TGFBR2 | GGTAGTTACGAGAGAGTT |
| | (SEQ ID NO: 57) | (SEQ ID NO: 843) |
| 330 | TGFBR2 | GGTAGTTATGAGAGAGTT |
| | (SEQ ID NO: 57) | (SEQ ID NO: 844) |
| 331 | TP73 | TGATTTAGCGTAGGTTTG |
| | (SEQ ID NO: 58) | (SEQ ID NO: 845) |
| 332 | TP73 | TGATTTAGTGTAGGTTTG |
| | (SEQ ID NO: 58) | (SEQ ID NO: 846) |
| 333 | TP73 | TTTGGTGCGCGTAGAGAA |
| | (SEQ ID NO: 58) | (SEQ ID NO: 1229) |
| 334 | TP73 | TTTGGTGTGTGTAGAGAA |
| | (SEQ ID NO: 58) | (SEQ ID NO: 1230) |
| 335 | TP73 | TTAGAGTTCGAGTTTATA |
| | (SEQ ID NO: 58) | (SEQ ID NO: 847) |
| 336 | TP73 | TTAGAGTTTGAGTTTATA |
| | (SEQ ID NO: 58) | (SEQ ID NO: 848) |
| 337 | TP73 | GAGTGTTCGCGTTTTGGG |
| | (SEQ ID NO: 58) | (SEQ ID NO: 849) |
| 338 | TP73 | GAGTGTTTGTGTTTTGGG |
| | (SEQ ID NO: 58) | (SEQ ID NO: 850) |
| 339 | TP73 | AAGATGTGCGAGTTAGTC |
| | (SEQ ID NO: 58) | (SEQ ID NO: 851) |
| 340 | TP73 | AAGATGTGTGAGTTAGTC |
| | (SEQ ID NO: 58) | (SEQ ID NO: 852) |
| 341 | TP73 | AAGTTACGGGTTTTATTG |
| | (SEQ ID NO: 58) | (SEQ ID NO: 853) |
| 342 | TP73 | AAGTTATGGGTTTTATTG |
| | (SEQ ID NO: 58) | (SEQ ID NO: 854) |
| 343 | TP73 | TTAGATTACGGGTTTTAT |
| | (SEQ ID NO: 58) | (SEQ ID NO: 855) |
| 344 | TP73 | TTAGATTATGGGTTTTAT |
| | (SEQ ID NO: 58) | (SEQ ID NO: 856) |
| 345 | TP73 | TAAGTAGCGTCGTTATTG |
| | (SEQ ID NO: 58) | (SEQ ID NO: 857) |
| 346 | TP73 | TAAGTAGTGTTGTTATTG |
| | (SEQ ID NO: 58) | (SEQ ID NO: 858) |
| 347 | TP73 | GGAAGTTTCGATGGTTTA |
| | (SEQ ID NO: 58) | (SEQ ID NO: 859) |
| 348 | TP73 | GGAAGTTTTGATGGTTTA |
| | (SEQ ID NO: 58) | (SEQ ID NO: 860) |
| 349 | CDKN1C | ATGAAGAACGGTTAAGGG |
| | (SEQ ID NO: 21) | (SEQ ID NO: 861) |
| 350 | CDKN1C | ATGAAGAATGGTTAAGGG |
| | (SEQ ID NO: 21) | (SEQ ID NO: 862) |
| 351 | CDKN1C | TTAAGTTACGGTTATTAG |
| | (SEQ ID NO: 21) | (SEQ ID NO: 863) |
| 352 | CDKN1C | TTAAGTTATGGTTATTAG |
| | (SEQ ID NO: 21) | (SEQ ID NO: 864) |
| 353 | CDKN1C | TTAGTGTTCGTTTGGAAT |
| | (SEQ ID NO: 21) | (SEQ ID NO: 865) |
| 354 | CDKN1C | TTAGTGTTTGTTTGGAAT |
| | (SEQ ID NO: 21) | (SEQ ID NO: 866) |
| 355 | CDKN1C | AGGAGTTGCGGTGGGAAT |
| | (SEQ ID NO: 21) | (SEQ ID NO: 867) |
| 356 | CDKN1C | AGGAGTTGTGGTGGGAAT |
| | (SEQ ID NO: 21) | (SEQ ID NO: 868) |
| 357 | GSK3β | GGGTAAAGCGCGGATATT |
| | (SEQ ID NO: 32) | (SEQ ID NO: 869) |
| 358 | GSK3β | GGGTAAAGTGTGGATATT |
| | (SEQ ID NO: 32) | (SEQ ID NO: 870) |
| 359 | GSK3β | TATGTTTTCGGCGAATGG |
| | (SEQ ID NO: 32) | (SEQ ID NO: 871) |
| 360 | GSK3β | TATGTTTTTGGTGAATGG |
| | (SEQ ID NO: 32) | (SEQ ID NO: 872) |
| 361 | GSK3β | GGGGAATAGTCGAGGAGT |
| | (SEQ ID NO: 32) | (SEQ ID NO: 873) |
| 362 | GSK3β | GGGGAATAGTTGAGGAGT |
| | (SEQ ID NO: 32) | (SEQ ID NO: 874) |
| 363 | GSK3β | AGGAGTCGTTGTTTGGGG |
| | (SEQ ID NO: 32) | (SEQ ID NO: 875) |
| 364 | GSK3β | AGGAGTTGTTGTTTGGGG |
| | (SEQ ID NO: 32) | (SEQ ID NO: 876) |
| 365 | CDC2 | TAGTTATTCGGGAAGGTA |
| | (SEQ ID NO: 14) | (SEQ ID NO: 877) |
| 366 | CDC2 | TAGTTATTGGGAAGGTA |
| | (SEQ ID NO: 14) | (SEQ ID NO: 878) |
| 367 | CDC2 | AGGTATTGCGGTAGTTGG |
| | (SEQ ID NO: 14) | (SEQ ID NO: 879) |
| 368 | CDC2 | AGGTATTGTGGTAGTTGG |
| | (SEQ ID NO: 14) | (SEQ ID NO: 880) |
| 369 | CDC2 | GGGTTATTCGATTGGTGA |
| | (SEQ ID NO: 14) | (SEQ ID NO: 881) |
| 370 | CDC2 | GGGTTATTTGATTGGTGA |
| | (SEQ ID NO: 14) | (SEQ ID NO: 882) |
| 371 | CDC2 | AAATTGTTCGTATTTGGT |
| | (SEQ ID NO: 14) | (SEQ ID NO: 883) |
| 372 | CDC2 | AAATTGTTTGTATTTGGT |
| | (SEQ ID NO: 14) | (SEQ ID NO: 884) |
| 373 | ESR1 | AGATATATCGGAGTTTGG |
| | (SEQ ID NO: 28) | (SEQ ID NO: 885) |
| 374 | ESR1 | AGATATATTGGAGTTTGG |
| | (SEQ ID NO: 28) | (SEQ ID NO: 886) |
| 375 | ESR1 | GTTTGGTACGGGGTATAT |
| | (SEQ ID NO: 28) | (SEQ ID NO: 887) |
| 376 | ESR1 | GTTTGGTATGGGGTATAT |
| | (SEQ ID NO: 28) | (SEQ ID NO: 888) |
| 377 | ESR1 | TTTTAAATCGAGTTGTGT |
| | (SEQ ID NO: 28) | (SEQ ID NO: 889) |
| 378 | ESR1 | TTTTAAATTGAGTTGTGT |
| | (SEQ ID NO: 28) | (SEQ ID NO: 890) |
| 379 | ESR1 | TATGAGTTCGGGAGATTA |
| | (SEQ ID NO: 28) | (SEQ ID NO: 891) |
| 380 | ESR1 | TATGAGTTTGGGAGATTA |
| | (SEQ ID NO: 28) | (SEQ ID NO: 892) |
| 381 | ESR1 | TGGAGGTTCGGGAGTTTA |
| | (SEQ ID NO: 28) | (SEQ ID NO: 893) |
| 382 | ESR1 | TGGAGGTTTGGGAGTTTA |
| | (SEQ ID NO: 28) | (SEQ ID NO: 894) |
| 383 | APAF1 | TTTGGTATCGTTTAGAGT |
| | (SEQ ID NO: 3) | (SEQ ID NO: 895) |
| 384 | APAF1 | TTTGGTATTGTTTAGAGT |
| | (SEQ ID NO: 3) | (SEQ ID NO: 896) |
| 385 | APAF1 | GTATGAGTCGTGGTAGGA |
| | (SEQ ID NO: 3) | (SEQ ID NO: 897) |
| 386 | APAF1 | GTATGAGTTGTGGTAGGA |
| | (SEQ ID NO: 3) | (SEQ ID NO: 898) |
| 387 | APAF1 | GTGGATTCGGCGGGATTT |
| | (SEQ ID NO: 3) | (SEQ ID NO: 899) |
| 388 | APAF1 | GTGGATTTGGTGGGATTT |
| | (SEQ ID NO: 3) | (SEQ ID NO: 900) |
| 389 | APAF1 | TTTAGAGGCGGAGAAGAA |
| | (SEQ ID NO: 3) | (SEQ ID NO: 901) |
| 390 | APAF1 | TTTAGAGGTGGAGAAGAA |
| | (SEQ ID NO: 3) | (SEQ ID NO: 902) |
| 391 | APAF1 | GAAGAGGTAGCGAGTGGA |
| | (SEQ ID NO: 3) | (SEQ ID NO: 903) |
| 392 | APAF1 | GAAGAGGTAGTGAGTGGA |
| | (SEQ ID NO: 3) | (SEQ ID NO: 904) |
| 393 | BAK1 | TAGGTTGTCGGTTTGTGC |
| | (SEQ ID NO: 7) | (SEQ ID NO: 905) |
| 394 | BAK1 | TAGGTTGTTGGTTTGTGC |
| | (SEQ ID NO: 7) | (SEQ ID NO: 906) |
| 395 | BAK1 | TTTGTATTCGGTGGTTAT |
| | (SEQ ID NO: 7) | (SEQ ID NO: 907) |
| 396 | BAK1 | TTTGTATTTGGTGGTTAT |
| | (SEQ ID NO: 7) | (SEQ ID NO: 908) |
| 397 | BAK1 | GGAGTTTCGCGGGTTTTT |
| | (SEQ ID NO: 7) | (SEQ ID NO: 909) |
| 398 | BAK1 | GGAGTTTTGTGGGTTTTT |
| | (SEQ ID NO: 7) | (SEQ ID NO: 910) |
| 399 | BAK1 | TAGGATTTCGGTAGGTAA |
| | (SEQ ID NO: 7) | (SEQ ID NO: 911) |
| 400 | BAK1 | TAGGATTTTGGTAGGTAA |
| | (SEQ ID NO: 7) | (SEQ ID NO: 912) |
| 401 | BAX | AGTTTGGGCGTGGGTTAT |
| | (SEQ ID NO: 8) | (SEQ ID NO: 913) |
| 402 | BAX | AGTTTGGGTGTGGGTTAT |
| | (SEQ ID NO: 8) | (SEQ ID NO: 914) |
| 403 | BAX | ATTAGAGTTGCGATTGGA |
| | (SEQ ID NO: 8) | (SEQ ID NO: 915) |
| 404 | BAX | ATTAGAGTTGTGATTGGA |
| | (SEQ ID NO: 8) | (SEQ ID NO: 916) |
| 405 | BAX | GTATTTATCGGGAGATGT |
| | (SEQ ID NO: 8) | (SEQ ID NO: 917) |
| 406 | BAX | GTATTTATTGGGAGATGT |
| | (SEQ ID NO: 8) | (SEQ ID NO: 918) |
| 407 | BAX | TTTAGAGGCGGGGGTGAG |
| | (SEQ ID NO: 8) | (SEQ ID NO: 919) |
| 408 | BAX | TTTAGAGGTGGGGGTGAG |
| | (SEQ ID NO: 8) | (SEQ ID NO: 920) |
| 409 | CASP10 | GAAGTAAACGGTTTTTAG |
| | (SEQ ID NO: 10) | (SEQ ID NO: 921) |
| 410 | CASP10 | GAAGTAAATGGTTTTTAG |
| | (SEQ ID NO: 10) | (SEQ ID NO: 922) |
| 411 | CASP10 | TTATAATACGAAGTTATG |
| | (SEQ ID NO: 10) | (SEQ ID NO: 923) |
| 412 | CASP10 | TTATAATATGAAGTTATG |
| | (SEQ ID NO: 10) | (SEQ ID NO: 924) |
| 413 | CASP10 | GAGGTTTTCGGATTTTTT |
| | (SEQ ID NO: 10) | (SEQ ID NO: 925) |
| 414 | CASP10 | GAGGTTTTTGGATTTTTT |
| | (SEQ ID NO: 10) | (SEQ ID NO: 926) |
| 415 | CASP10 | TTTTGTTTCGGTAAAAGG |
| | (SEQ ID NO: 10) | (SEQ ID NO: 927) |
| 416 | CASP10 | TTTTGTTTTGGTAAAAGG |
| | (SEQ ID NO: 10) | (SEQ ID NO: 928) |
| 417 | CASP8 | GAATGAGTCGAGGAAGGT |
| | (SEQ ID NO: 11) | (SEQ ID NO: 929) |
| 418 | CASP8 | GAATGAGTTGAGGAAGGT |
| | (SEQ ID NO: 11) | (SEQ ID NO: 930) |
| 419 | CASP8 | TATTGAGACGTTAAGTAA |
| | (SEQ ID NO: 11) | (SEQ ID NO: 931) |
| 420 | CASP8 | TATTGAGATGTTAAGTAA |
| | (SEQ ID NO: 11) | (SEQ ID NO: 932) |
| 421 | CASP8 | TAAGGTTACGTAGTTAGT |
| | (SEQ ID NO: 11) | (SEQ ID NO: 933) |
| 422 | CASP8 | TAAGGTTATGTAGTTAGT |
| | (SEQ ID NO: 11) | (SEQ ID NO: 934) |
| 423 | CASP8 | GTTAATAGCGGGGATTTT |
| | (SEQ ID NO: 11) | (SEQ ID NO: 935) |
| 424 | CASP8 | GTTAATAGTGGGGATTTT |
| | (SEQ ID NO: 11) | (SEQ ID NO: 936) |
| 425 | CASP9 | TATATGATCGAGGATATT |
| | (SEQ ID NO: 12) | (SEQ ID NO: 937) |
| 426 | CASP9 | TATATGATTGAGGATATT |
| | (SEQ ID NO: 12) | (SEQ ID NO: 938) |
| 427 | CASP9 | ATTTTTTAGTCGGGTGTT |
| | (SEQ ID NO: 12) | (SEQ ID NO: 939) |
| 428 | CASP9 | ATTTTTTAGTTGGGTGTT |
| | (SEQ ID NO: 12) | (SEQ ID NO: 940) |
| 429 | CASP9 | TTAGTTAGCGTATATTGT |
| | (SEQ ID NO: 12) | (SEQ ID NO: 941) |
| 430 | CASP9 | TTAGTTAGTGTATATTGT |
| | (SEQ ID NO: 12) | (SEQ ID NO: 942) |
| 431 | CASP9 | TGATAAAACGTTAGAGGT |
| | (SEQ ID NO: 12) | (SEQ ID NO: 943) |
| 432 | CASP9 | TGATAAAATGTTAGAGGT |
| | (SEQ ID NO: 12) | (SEQ ID NO: 944) |
| 433 | TCL1A | TTAGAGTATGTTTTTTGG |
| | (SEQ ID NO: 56) | (SEQ ID NO: 945) |
| 434 | TCL1A | TTAGAGTATGTTTTTTGG |
| | (SEQ ID NO: 56) | (SEQ ID NO: 946) |
| 435 | TCL1A | TTTATAGTCGATATTAGG |
| | (SEQ ID NO: 56) | (SEQ ID NO: 947) |
| 436 | TCL1A | TTTATAGTTGATATTAGG |
| | (SEQ ID NO: 56) | (SEQ ID NO: 948) |
| 437 | TCL1A | TAGATTCGGTTTTAGTTG |
| | (SEQ ID NO: 56) | (SEQ ID NO: 949) |
| 438 | TCL1A | TAGATTTGGTTTTAGTTG |
| | (SEQ ID NO: 56) | (SEQ ID NO: 950) |
| 439 | TCL1A | TTTTGGAACGGTGGTAGT |
| | (SEQ ID NO: 56) | (SEQ ID NO: 951) |
| 440 | TCL1A | TTTTGGAATGGTGGTAGT |
| | (SEQ ID NO: 56) | (SEQ ID NO: 952) |
| 441 | PML | TTAAGAGTCGTAGATGTA |
| | (SEQ ID NO: 48) | (SEQ ID NO: 953) |
| 442 | PML | TTAAGAGTTGTAGATGTA |
| | (SEQ ID NO: 48) | (SEQ ID NO: 954) |
| 443 | PML | GAGTTGGGCGTATAAAGA |
| | (SEQ ID NO: 48) | (SEQ ID NO: 955) |
| 444 | PML | GAGTTGGGTGTATAAAGA |
| | (SEQ ID NO: 48) | (SEQ ID NO: 956) |
| 445 | PML | GTAAAGCGGGAGAGGTAG |
| | (SEQ ID NO: 48) | (SEQ ID NO: 957) |
| 446 | PML | GTAAAGTGGGAGAGGTAG |
| | (SEQ ID NO: 48) | (SEQ ID NO: 958) |
| 447 | PML | TTAAAGATACGTTTAGAG |
| | (SEQ ID NO: 48) | (SEQ ID NO: 959) |
| 448 | PML | TTAAAGATATGTTTAGAG |
| | (SEQ ID NO: 48) | (SEQ ID NO: 960) |
| 449 | HOXA5 | AGTTAGTCGGGTTTTAAG |
| | (SEQ ID NO: 35) | (SEQ ID NO: 961) |
| 450 | HOXA5 | AGTTAGTTGGGTTTTAAG |
| | (SEQ ID NO: 35) | (SEQ ID NO: 962) |
| 451 | HOXA5 | TTATAGGGTTCGGTTTTT |
| | (SEQ ID NO: 35) | (SEQ ID NO: 963) |
| 452 | HOXA5 | TTATAGGGTTTGGTTTTT |
| | (SEQ ID NO: 35) | (SEQ ID NO: 964) |
| 453 | HOXA5 | TTTTAAGGCGAGGTTAAA |
| | (SEQ ID NO: 35) | (SEQ ID NO: 965) |
| 454 | HOXA5 | TTTTAAGGTGAGGTTAAA |
| | (SEQ ID NO: 35) | (SEQ ID NO: 966) |
| 455 | HOXA5 | ATGATAGGCGTTTATTAA |
| | (SEQ ID NO: 35) | (SEQ ID NO: 967) |
| 456 | HOXA5 | ATGATAGGTGTTTATTAA |
| | (SEQ ID NO: 35) | (SEQ ID NO: 968) |
| 457 | SDC4 | GGTTATACGATTTTTGTG |
| | (SEQ ID NO: 54) | (SEQ ID NO: 969) |
| 458 | SDC4 | GGTTATATGATTTTTGTG |
| | (SEQ ID NO: 54) | (SEQ ID NO: 970) |
| 459 | SDC4 | TAGGTTTTGCGGGTTATA |
| | (SEQ ID NO: 54) | (SEQ ID NO: 971) |
| 460 | SDC4 | TAGGTTTTGTGGGTTATA |
| | (SEQ ID NO: 54) | (SEQ ID NO: 972) |
| 461 | SDC4 | ATGTGAATCGTGTTAAGA |
| | (SEQ ID NO: 54) | (SEQ ID NO: 973) |
| 462 | SDC4 | ATGTGAATTGTGTTAAGA |
| | (SEQ ID NO: 54) | (SEQ ID NO: 974) |
| 463 | SDC4 | TTTTATATCGGGTGTGTT |
| | (SEQ ID NO: 54) | (SEQ ID NO: 1223) |
| 464 | SDC4 | TTTTATATTGGGTGTGTT |
| | (SEQ ID NO: 54) | (SEQ ID NO: 1224) |
| 465 | PITX2 | TTAAGAGACGGAATAAAG |
| | (SEQ ID NO: 47) | (SEQ ID NO: 975) |
| 466 | PITX2 | TTAAGAGATGGAATAAAG |
| | (SEQ ID NO: 47) | (SEQ ID NO: 976) |
| 467 | PITX2 | AATTAGGACGGGTTGGGA |
| | (SEQ ID NO: 47) | (SEQ ID NO: 977) |
| 468 | PITX2 | AATTAGGATGGGTTGGGA |
| | (SEQ ID NO: 47) | (SEQ ID NO: 978) |
| 469 | PITX2 | TAGGAGTACGGATTTTTA |
| | (SEQ ID NO: 47) | (SEQ ID NO: 979) |
| 470 | PITX2 | TAGGAGTATGGATTTTTA |
| | (SEQ ID NO: 47) | (SEQ ID NO: 980) |
| 471 | PITX2 | GAGTTAATCGAGGAGTAG |
| | (SEQ ID NO: 47) | (SEQ ID NO: 981) |
| 472 | PITX2 | GAGTTAATTGAGGAGTAG |
| | (SEQ ID NO: 47) | (SEQ ID NO: 982) |
| 473 | PITX2 | GGATTTGGCGGGGTATTT |
| | (SEQ ID NO: 47) | (SEQ ID NO: 983) |
| 474 | PITX2 | GGATTTGGTGGGGTATTT |
| | (SEQ ID NO: 47) | (SEQ ID NO: 984) |
| 475 | GPR37 | AGTTTAGACGAAGTTTTA |
| | (SEQ ID NO: 31) | (SEQ ID NO: 985) |
| 476 | GPR37 | AGTTTAGATGAAGTTTTA |
| | (SEQ ID NO: 31) | (SEQ ID NO: 986) |
| 477 | GPR37 | GTTATTTTCGGTGGTTGA |
| | (SEQ ID NO: 31) | (SEQ ID NO: 987) |
| 478 | GPR37 | GTTATTTTTGGTGGTTGA |
| | (SEQ ID NO: 31) | (SEQ ID NO: 988) |
| 479 | GPR37 | AGGGTGATAGCGGAAGAT |
| | (SEQ ID NO: 31) | (SEQ ID NO: 989) |
| 480 | GPR37 | AGGGTGATAGTGGAAGAT |
| | (SEQ ID NO: 31) | (SEQ ID NO: 990) |
| 481 | GPR37 | GTTAGGATCGATATTTGT |
| | (SEQ ID NO: 31) | (SEQ ID NO: 991) |
| 482 | GPR37 | GTTAGGATTGATATTTGT |
| | (SEQ ID NO: 31) | (SEQ ID NO: 992) |
| 483 | PRAME | GGGATTGTCGTATAAAAT |
| | (SEQ ID NO: 50) | (SEQ ID NO: 993) |
| 484 | PRAME | GGGATTGTTGTATAAAAT |
| | (SEQ ID NO: 50) | (SEQ ID NO: 994) |
| 485 | PRAME | TTTAGATTCGATTTGGGA |
| | (SEQ ID NO: 50) | (SEQ ID NO: 995) |
| 486 | PRAME | TTTAGATTTGATTTGGGA |
| | (SEQ ID NO: 50) | (SEQ ID NO: 996) |
| 487 | PRAME | TAGAGTTGCGGGTTTTTA |
| | (SEQ ID NO: 50) | (SEQ ID NO: 997) |
| 488 | PRAME | TAGAGTTGTGGGTTTTTA |
| | (SEQ ID NO: 50) | (SEQ ID NO: 998) |
| 489 | PRAME | AATAGGTCGCGTGGTGAG |
| | (SEQ ID NO: 50) | (SEQ ID NO: 999) |
| 490 | PRAME | AATAGGTTGTGTGGTGAG |
| | (SEQ ID NO: 50) | (SEQ ID NO: 1000) |
| 491 | N-MYC | AGTTTTGGCGTTTTTTTT |
| | (SEQ ID NO: 60) | (SEQ ID NO: 1001) |
| 492 | N-MYC | AGTTTTGGTGTTTTTTTT |
| | (SEQ ID NO: 60) | (SEQ ID NO: 1002) |
| 493 | N-MYC | GGTAAAGTCGTTTTTTTT |
| | (SEQ ID NO: 60) | (SEQ ID NO: 1003) |
| 494 | N-MYC | GGTAAAGTTGTTTTTTTT |
| | (SEQ ID NO: 60) | (SEQ ID NO: 1004) |
| 495 | N-MYC | TTTGTTTGCGTTATAGTT |
| | (SEQ ID NO: 60) | (SEQ ID NO: 1005) |
| 496 | N-MYC | TTTGTTTGTGTTTATAGTT |
| | (SEQ ID NO: 60) | (SEQ ID NO: 1006) |
| 497 | N-MYC | ATATTTTTCGAGTTTTAA |
| | (SEQ ID NO: 60) | (SEQ ID NO: 1007) |
| 498 | N-MYC | ATATTTTTTGAGTTTTAA |
| | (SEQ ID NO: 60) | (SEQ ID NO: 1008) |
| 499 | N-MYC | TTTTAAAGCGTAGGTTGT |
| | (SEQ ID NO: 60) | (SEQ ID NO: 1009) |
| 500 | N-MYC | TTTTAAAGTGTAGGTTGT |
| | (SEQ ID NO: 60) | (SEQ ID NO: 1010) |
| 501 | N-MYC | GGTGGATGCGGGGGGTTT |
| | (SEQ ID NO: 60) | (SEQ ID NO: 1011) |
| 502 | N-MYC | GGTGGATGTGGGGGGTTT |
| | (SEQ ID NO: 60) | (SEQ ID NO: 1012) |
| 503 | L-MYC | GGGTGGGGCGGGGAGTAG |
| | (SEQ ID NO: 61) | (SEQ ID NO: 1013) |
| 504 | L-MYC | GGGTGGGGTGGGGAGTAG |
| | (SEQ ID NO: 61) | (SEQ ID NO: 1014) |
| 505 | L-MYC | TTTTAGTTCGGAGTGGGT |
| | (SEQ ID NO: 61) | (SEQ ID NO: 1015) |
| 506 | L-MYC | TTTTAGTTTGGAGTGGGT |
| | (SEQ ID NO: 61) | (SEQ ID NO: 1016) |
| 507 | L-MYC | AAGGAGTACGGTTTAGTT |
| | (SEQ ID NO: 61) | (SEQ ID NO: 1017) |
| 508 | L-MYC | AAGGAGTATGGTTTAGTT |
| | (SEQ ID NO: 61) | (SEQ ID NO: 1018) |
| 509 | L-MYC | AGTTTAGTCGGTTGGTAT |
| | (SEQ ID NO: 61) | (SEQ ID NO: 1019) |
| 510 | L-MYC | AGTTTAGTTGGTTGGTAT |
| | (SEQ ID NO: 61) | (SEQ ID NO: 1020) |
| 511 | L-MYC | TTTGTTTGCGTTTTTTAG |
| | (SEQ ID NO: 61) | (SEQ ID NO: 1021) |
| 512 | L-MYC | TTTGTTTGTGTTTTTTAG |
| | (SEQ ID NO: 61) | (SEQ ID NO: 1022) |
| 513 | L-MYC | TTTTTTAGCGTGTAATTT |
| | (SEQ ID NO: 61) | (SEQ ID NO: 1023) |
| 514 | L-MYC | TTTTTTAGTGTGTAATTT |
| | (SEQ ID NO: 61) | (SEQ ID NO: 1024) |
| 515 | L-MYC | GGGGTTATCGGGGATTGA |
| | (SEQ ID NO: 61) | (SEQ ID NO: 1025) |
| 516 | L-MYC | GGGGTTATTGGGGATTGA |
| | (SEQ ID NO: 61) | (SEQ ID NO: 1026) |
| 517 | L-MYC | GGTGGGGTCGGTTTTATT |
| | (SEQ ID NO: 61) | (SEQ ID NO: 1027) |
| 518 | L-MYC | GGTGGGGTTGGTTTTATT |
| | (SEQ ID NO: 61) | (SEQ ID NO: 1028) |
| 519 | L-MYC | GGAGAGGGCGGGGTTTGT |
| | (SEQ ID NO: 61) | (SEQ ID NO: 1029) |
| 520 | L-MYC | GGAGAGGGTGGGGTTTGT |
| | (SEQ ID NO: 61) | (SEQ ID NO: 1030) |
| 521 | L-MYC | TTGAGGGTCGTTAGGTGG |
| | (SEQ ID NO: 61) | (SEQ ID NO: 1031) |
| 522 | L-MYC | TTGAGGGTTGTTAGGTGG |
| | (SEQ ID NO: 61) | (SEQ ID NO: 1032) |
| 523 | C-ABL | ATTAGAGTCGGGAGGGGC |
| | (SEQ ID NO: 62) | (SEQ ID NO: 1033) |
| 524 | C-ABL | ATTAGAGTTGGGAGGGGC |
| | (SEQ ID NO: 62) | (SEQ ID NO: 1034) |
| 525 | C-ABL | GGGGTATTCGGGTTTTTT |
| | (SEQ ID NO: 62) | (SEQ ID NO: 1035) |
| 526 | C-ABL | GGGGTATTTGGGTTTTTT |
| | (SEQ ID NO: 62) | (SEQ ID NO: 1036) |
| 527 | C-ABL | TTTGGTTTCGTTGTGGAG |
| | (SEQ ID NO: 62) | (SEQ ID NO: 1037) |
| 528 | C-ABL | TTTGGTTTTGTTGTGGAG |
| | (SEQ ID NO: 62) | (SEQ ID NO: 1038) |
| 529 | C-ABL | TTGAGTAGCGTTGGAGTC |
| | (SEQ ID NO: 62) | (SEQ ID NO: 1039) |
| 530 | C-ABL | TTGAGTAGTGTTGGAGTC |
| | (SEQ ID NO: 62) | (SEQ ID NO: 1040) |
| 531 | C-ABL | GGGTTTTGCGGTTGAGGA |
| | (SEQ ID NO: 62) | (SEQ ID NO: 1041) |
| 532 | C-ABL | GGGTTTTGTGGTTGAGGA |
| | (SEQ ID NO: 62) | (SEQ ID NO: 1042) |
| 533 | C-ABL | AGTTTTTTCGTTGTTTAC |
| | (SEQ ID NO: 62) | (SEQ ID NO: 1043) |
| 534 | C-ABL | AGTTTTTTTGTTGTTTAC |
| | (SEQ ID NO: 62) | (SEQ ID NO: 1044) |
| 535 | C-ABL | GTTGTTTACGGTTTTTAT |
| | (SEQ ID NO: 62) | (SEQ ID NO: 1045) |
| 536 | C-ABL | GTTGTTTATGGTTTTTAT |
| | (SEQ ID NO: 62) | (SEQ ID NO: 1046) |
| 537 | C-ABL | TTTGAGGGCGGTGGTGGT |
| | (SEQ ID NO: 62) | (SEQ ID NO: 1047) |
| 538 | C-ABL | TTTGAGGGTGGTGGTGGT |
| | (SEQ ID NO: 62) | (SEQ ID NO: 1048) |
| 539 | C-ABL | GGGTGTTTCGGGTAGAGA |
| | (SEQ ID NO: 62) | (SEQ ID NO: 1049) |
| 540 | C-ABL | GGGTGTTTTGGGTAGAGA |
| | (SEQ ID NO: 62) | (SEQ ID NO: 1050) |
| 541 | C-ABL | GAGATTTTCGGGTTTGGG |
| | (SEQ ID NO: 62) | (SEQ ID NO: 1051) |
| 542 | C-ABL | GAGATTTTTGGGTTTGGG |
| | (SEQ ID NO: 62) | (SEQ ID NO: 1052) |
| 543 | ELK1 | TTTGTTTTCGTTGAGTAG |
| | (SEQ ID NO: 63) | (SEQ ID NO: 1053) |
| 544 | ELK1 | TTTGTTTTTGTTGAGTAG |
| | (SEQ ID NO: 63) | (SEQ ID NO: 1054) |
| 545 | ELK1 | TTTATTTTCGTTTTTGGG |
| | (SEQ ID NO: 63) | (SEQ ID NO: 1241) |
| 546 | ELK1 | TTTATTTTTGTTTTTGGG |
| | (SEQ ID NO: 63) | (SEQ ID NO: 1242) |
| 547 | ELK1 | ATAGGTTTCGAGTTTTTT |
| | (SEQ ID NO: 63) | (SEQ ID NO: 1055) |
| 548 | ELK1 | ATAGGTTTTGAGTTTTTT |
| | (SEQ ID NO: 63) | (SEQ ID NO: 1056) |
| 549 | ELK1 | TTATAGTTCGTTAGTTTT |
| | (SEQ ID NO: 63) | (SEQ ID NO: 1057) |
| 550 | ELK1 | TTATAGTTTGTTAGTTTT |
| | (SEQ ID NO: 63) | (SEQ ID NO: 1058) |
| 551 | ELK1 | TGGAGTATCGTGAAGGTC |
| | (SEQ ID NO: 63) | (SEQ ID NO: 1059) |
| 552 | ELK1 | TGGAGTATTGTGAAGGTC |
| | (SEQ ID NO: 63) | (SEQ ID NO: 1060) |
| 553 | ELK1 | TTTTTTTACGTTAATTAC |
| | (SEQ ID NO: 63) | (SEQ ID NO: 1061) |
| 554 | ELK1 | TTTTTTTATGTTAATTAC |
| | (SEQ ID NO: 63) | (SEQ ID NO: 1062) |
| 555 | ELK1 | GTTAATTACGGTATAGTT |
| | (SEQ ID NO: 63) | (SEQ ID NO: 1063) |
| 556 | ELK1 | GTTAATTATGGTATAGTT |
| | (SEQ ID NO: 63) | (SEQ ID NO: 1064) |
| 557 | ELK1 | GAAGGGTTCGTTTTTTAA |
| | (SEQ ID NO: 63) | (SEQ ID NO: 1065) |
| 558 | ELK1 | GAAGGGTTTGTTTTTTAA |
| | (SEQ ID NO: 63) | (SEQ ID NO: 1066) |
| 559 | ELK1 | TAATTTTTCGAGGTTTTG |
| | (SEQ ID NO: 63) | (SEQ ID NO: 1067) |
| 560 | ELK1 | TAATTTTTTGAGGTTTTG |
| | (SEQ ID NO: 63) | (SEQ ID NO: 1068) |
| 561 | ELK1 | ATTAATAGCGTTTTGGTT |
| | (SEQ ID NO: 63) | (SEQ ID NO: 1069) |
| 562 | ELK1 | ATTAATAGTGTTTTGGTT |
| | (SEQ ID NO: 63) | (SEQ ID NO: 1070) |
| 563 | ELK1 | GTTTAGTTCGATTTATTT |
| | (SEQ ID NO: 63) | (SEQ ID NO: 1071) |
| 564 | ELK1 | GTTTAGTTTGATTTATTT |
| | (SEQ ID NO: 63) | (SEQ ID NO: 1072) |
| 565 | ELK1 | GGTTGTTACGTTTATTTT |
| | (SEQ ID NO: 63) | (SEQ ID NO: 1073) |
| 566 | ELK1 | GGTTGTTATGTTTATTTT |
| | (SEQ ID NO: 63) | (SEQ ID NO: 1074) |
| 567 | Tubulin | TACTTCAACGTCCTAATA |
| | (SEQ ID NO: 64) | (SEQ ID NO: 1239) |
| 568 | Tubulin | TACTTCAACATCCTAATA |
| | (SEQ ID NO: 64) | (SEQ ID NO: 1240) |
| 569 | Tubulin | CAATACTCCGTCCATTAA |
| | (SEQ ID NO: 64) | (SEQ ID NO: 1243) |
| 570 | Tubulin | CAATACTCCATCCATTAA |
| | (SEQ ID NO: 64) | (SEQ ID NO: 1244) |
| 571 | Tubulin | TAATCAACCGCAACCTCC |
| | (SEQ ID NO: 64) | (SEQ ID NO: 1075) |
| 572 | Tubulin | TAATCAACCACAACCTCC |
| | (SEQ ID NO: 64) | (SEQ ID NO: 1076) |
| 573 | Tubulin | CTTACCCCCGTCAATCAA |
| | (SEQ ID NO: 64) | (SEQ ID NO: 1077) |
| 574 | Tubulin | CTTACCCCCATCAATCAA |
| | (SEQ ID NO: 64) | (SEQ ID NO: 1078) |
| 575 | Tubulin | GCTAATCTCGAAATAAAC |
| | (SEQ ID NO: 64) | (SEQ ID NO: 1079) |
| 576 | Tubulin | GCTAATCTCAAAATAAAC |
| | (SEQ ID NO: 64) | (SEQ ID NO: 1080) |
| 577 | CSF1 | TTATAGAGCGTTAGTATT |
| | (SEQ ID NO: 65) | (SEQ ID NO: 1081) |
| 578 | CSF1 | TTATAGAGTGTTAGTATT |
| | (SEQ ID NO: 65) | (SEQ ID NO: 1082) |
| 579 | CSF1 | AAGTGTAGCGTAGAAGAT |
| | (SEQ ID NO: 65) | (SEQ ID NO: 1083) |
| 580 | CSF1 | AAGTGTAGTGTAGAAGAT |
| | (SEQ ID NO: 65) | (SEQ ID NO: 1084) |
| 581 | CSF1 | AGGGGAGGCGGGGGAAGG |
| | (SEQ ID NO: 65) | (SEQ ID NO: 1085) |
| 582 | CSF1 | AGGGGAGGTGGGGGAAGG |
| | (SEQ ID NO: 65) | (SEQ ID NO: 1086) |
| 583 | CSF1 | GGGGAAGGCGGTTGAGTG |
| | (SEQ ID NO: 65) | (SEQ ID NO: 1087) |
| 584 | CSF1 | GGGGAAGGTGGTTGAGTG |
| | (SEQ ID NO: 65) | (SEQ ID NO: 1088) |
| 585 | CSF1 | GTGTTTGGCGTTTGGTTA |
| | (SEQ ID NO: 65) | (SEQ ID NO: 1089) |
| 586 | CSF1 | GTGTTTGGTGTTTGGTTA |
| | (SEQ ID NO: 65) | (SEQ ID NO: 1090) |
| 587 | CD1R3 | TAACTATACGAACTACAA |
| | (SEQ ID NO: 66) | (SEQ ID NO: 1091) |
| 588 | CD1R3 | TAACTATACAAACTACAA |
| | (SEQ ID NO: 66) | (SEQ ID NO: 1092) |
| 589 | CD1R3 | ACCCTCCTCGCTAAACTT |
| | (SEQ ID NO: 66) | (SEQ ID NO: 1093) |
| 590 | CD1R3 | ACCCTCCTCACTAAACTT |
| | (SEQ ID NO: 66) | (SEQ ID NO: 1094) |
| 591 | CD1R3 | CCAAACCCCGACAACCCT |
| | (SEQ ID NO: 66) | (SEQ ID NO: 1095) |
| 592 | CD1R3 | CCAAACGCCAACAACCCT |
| | (SEQ ID NO: 66) | (SEQ ID NO: 1096) |
| 593 | CD1R3 | TCCCTTTCCGCTAAATAC |
| | (SEQ ID NO: 66) | (SEQ ID NO: 1097) |
| 594 | CD1R3 | TCCCTTTCCACTAAATAC |
| | (SEQ ID NO: 66) | (SEQ ID NO: 1098) |
| 595 | CD1R3 | TCAACTCACGTCCCTTTC |
| | (SEQ ID NO: 66) | (SEQ ID NO: 1099) |
| 596 | CD1R3 | TCAACTCACATCCCTTTC |
| | (SEQ ID NO: 66) | (SEQ ID NO: 1100) |
| 597 | CSNK2B | AGGAGTTTCGGAGGAAAT |
| | (SEQ ID NO: 67) | (SEQ ID NO: 1235) |
| 598 | CSNK2B | AGGAGTTTTGGAGGAAAT |
| | (SEQ ID NO: 67) | (SEQ ID NO: 1236) |
| 599 | CSNK2B | ATTTCCTCCGAAACTCCT |
| | (SEQ ID NO: 67) | (SEQ ID NO: 1237) |
| 600 | CSNK2B | ATTTCCTCCAAAACTCCT |
| | (SEQ ID NO: 67) | (SEQ ID NO: 1238) |
| 601 | CSNK2B | GATTGATTCGTATTAGGG |
| | (SEQ ID NO: 67) | (SEQ ID NO: 1101) |
| 602 | CSNK2B | GATTGATTTGTATTAGGG |
| | (SEQ ID NO: 67) | (SEQ ID NO: 1102) |
| 603 | CSNK2B | CCCTAATACGAATCAATC |
| | (SEQ ID NO: 67) | (SEQ ID NO: 1103) |
| 604 | CSNK2B | CCCTAATACAAATCAATC |
| | (SEQ ID NO: 67) | (SEQ ID NO: 1104) |
| 605 | CSNK2B | GGATTTAGCGGATTGGTC |
| | (SEQ ID NO: 67) | (SEQ ID NO: 1105) |
| 606 | CSNK2B | GGATTTAGTGGATTGGTC |
| | (SEQ ID NO: 67) | (SEQ ID NO: 1106) |
| 607 | CSNK2B | GACCAATCCGCTAAATCC |
| | (SEQ ID NO: 67) | (SEQ ID NO: 1107) |
| 608 | CSNK2B | GACCAATCCACTAAATCC |
| | (SEQ ID NO: 67) | (SEQ ID NO: 1108) |
| 609 | CSNK2B | GGATTGGTCGAGGATAGG |
| | (SEQ ID NO: 67) | (SEQ ID NO: 1109) |
| 610 | CSNK2B | GGATTGGTTGAGGATAGG |
| | (SEQ ID NO: 67) | (SEQ ID NO: 1110) |
| 611 | CSNK2B | CCTATCCTCGACCAATCC |
| | (SEQ ID NO: 67) | (SEQ ID NO: 1111) |
| 612 | CSNK2B | CCTATCCTCAACCAATCC |
| | (SEQ ID NO: 67) | (SEQ ID NO: 1112) |
| 613 | CSNK2B | GAGGGGAACGTGAGGAGA |
| | (SEQ ID NO: 67) | (SEQ ID NO: 1113) |
| 614 | CSNK2B | GAGGGGAATGTGAGGAGA |
| | (SEQ ID NO: 67) | (SEQ ID NO: 1114) |
| 615 | CSNK2B | TCTCCTCACGTTCCCCTC |
| | (SEQ ID NO: 67) | (SEQ ID NO: 1115) |
| 616 | CSNK2B | TCTCCTCACATTCCCCTC |
| | (SEQ ID NO: 67) | (SEQ ID NO: 1116) |
| 617 | CSNK2B | TAGGTTAGCGTATTGGGA |
| | (SEQ ID NO: 67) | (SEQ ID NO: 1117) |
| 618 | CSNK2B | TAGGTTAGTGTATTGGGA |
| | (SEQ ID NO: 67) | (SEQ ID NO: 1118) |
| 619 | CSNK2B | TCCCAATACGCTAACCTA |
| | (SEQ ID NO: 67) | (SEQ ID NO: 1119) |
| 620 | CSNK2B | TCCCAATACACTAACCTA |
| | (SEQ ID NO: 67) | (SEQ ID NO: 1120) |
| 621 | CSNK2B | TATTGGGACGTTTTAGTT |
| | (SEQ ID NO: 67) | (SEQ ID NO: 1121) |
| 622 | CSNK2B | TATTGGGATGTTTTAGTT |
| | (SEQ ID NO: 67) | (SEQ ID NO: 1122) |
| 623 | CSNK2B | AACTAAAACGTCCCAATA |
| | (SEQ ID NO: 67) | (SEQ ID NO: 1123) |
| 624 | CSNK2B | AACTAAAACATCCCAATA |
| | (SEQ ID NO: 67) | (SEQ ID NO: 1124) |
| 625 | Me491/TD63 | TTGTTATTCGGTTTTAGT |
| | (SEQ ID NO: 68) | (SEQ ID NO: 1125) |
| 626 | Me491/TD63 | TTGTTATTTGGTTTTAGT |
| | (SEQ ID NO: 68) | (SEQ ID NO: 1126) |
| 627 | Me491/TD63 | AGTTGGTACGGAGGTATA |
| | (SEQ ID NO: 68) | (SEQ ID NO: 1127) |
| 628 | Me491/TD63 | AGTTGGTATGGAGGTATA |
| | (SEQ ID NO: 68) | (SEQ ID NO: 1128) |
| 629 | Me491/TD63 | AGGTATAGCGTTAGAGGG |
| | (SEQ ID NO: 68) | (SEQ ID NO: 1129) |
| 630 | Me491/TD63 | AGGTATAGTGTTAGAGGG |
| | (SEQ ID NO: 68) | (SEQ ID NO: 1130) |
| 631 | Me491/TD63 | AGGGGTTACGTGGTTTTG |
| | (SEQ ID NO: 68) | (SEQ ID NO: 1131) |
| 632 | Me491/TD63 | AGGGGTTATGTGGTTTTG |
| | (SEQ ID NO: 68) | (SEQ ID NO: 1132) |
| 633 | Me491/TD63 | TGTATAGTCGGATGGGGA |
| | (SEQ ID NO: 68) | (SEQ ID NO: 1133) |
| 634 | Me491/TD63 | TGTATAGTTGGATGGGGA |
| | (SEQ ID NO: 68) | (SEQ ID NO: 1134) |
| 635 | AR | ACCTCTCTCGAAATAACA |
| | (SEQ ID NO: 69) | (SEQ ID NO: 1135) |
| 636 | AR | ACCTCTCTCAAAATAACA |
| | (SEQ ID NO: 69) | (SEQ ID NO: 1136) |
| 637 | AR | CTCTAAAACGCAACCTCT |
| | (SEQ ID NO: 69) | (SEQ ID NO: 1137) |
| 638 | AR | CTCTAAAACACAACCTCT |
| | (SEQ ID NO: 69) | (SEQ ID NO: 1138) |
| 639 | AR | AACTACTACGACAACCCC |
| | (SEQ ID NO: 69) | (SEQ ID NO: 1139) |
| 640 | AR | AACTACTACAACAACCCC |
| | (SEQ ID NO: 69) | (SEQ ID NO: 1140) |
| 641 | AR | ACTAACCTCGCTCAAAAT |
| | (SEQ ID NO: 69) | (SEQ ID NO: 1141) |
| 642 | AR | ACTAACGTCACTCAAAAT |
| | (SEQ ID NO: 69) | (SEQ ID NO: 1142) |
| 643 | AR | ACTACCTTCGAATACTAC |
| | (SEQ ID NO: 69) | (SEQ ID NO: 1257) |
| 644 | AR | ACTACCTTCAAATACTAC |
| | (SEQ ID NO: 69) | (SEQ ID NO: 1258) |
| 645 | CDK4 | TATGGGGTCGTAGGAATC |
| | (SEQ ID NO: 70) | (SEQ ID NO: 1143) |
| 646 | CDK4 | TATGGGGTTGTAGGAATC |
| | (SEQ ID NO: 70) | (SEQ ID NO: 1144) |
| 647 | CDK4 | GATTCCTACGACCCCATA |
| | (SEQ ID NO: 70) | (SEQ ID NO: 1145) |
| 648 | CDK4 | GATTCCTACAACCCCATA |
| | (SEQ ID NO: 70) | (SEQ ID NO: 1146) |
| 649 | CDK4 | GGAAGGGTCGTTTAAGGG |
| | (SEQ ID NO: 70) | (SEQ ID NO: 1147) |
| 650 | CDK4 | GGAAGGGTTGTTTAAGGG |
| | (SEQ ID NO: 70) | (SEQ ID NO: 1148) |
| 651 | CDK4 | CCCTTAAACGACCCTTCC |
| | (SEQ ID NO: 70) | (SEQ ID NO: 1149) |
| 652 | CDK4 | CCCTTAAACAACCCTTCC |
| | (SEQ ID NO: 70) | (SEQ ID NO: 1150) |
| 653 | CDK4 | TTTAAGGGCGGGAAGTGG |
| | (SEQ ID NO: 70) | (SEQ ID NO: 1247) |
| 654 | CDK4 | TTTAAGGGTGGGAAGTGG |
| | (SEQ ID NO: 70) | (SEQ ID NO: 1248) |
| 655 | CDK4 | CCACTTCCCGCCGTTAAA |
| | (SEQ ID NO: 70) | (SEQ ID NO: 1249) |
| 656 | CDK4 | CCACTTCCCACCCTTAAA |
| | (SEQ ID NO: 70) | (SEQ ID NO: 1250) |
| 657 | CDK4 | AGGATTTTCGATGTAAGG |
| | (SEQ ID NO: 70) | (SEQ ID NO: 1151) |
| 658 | CDK4 | AGGATTTTTGATGTAAGG |
| | (SEQ ID NO: 70) | (SEQ ID NO: 1152) |
| 659 | CDK4 | CCTTACATCGAAAATCCT |
| | (SEQ ID NO: 70) | (SEQ ID NO: 1153) |
| 660 | CDK4 | CCTTACATCAAAAATCCT |
| | (SEQ ID NO: 70) | (SEQ ID NO: 1154) |
| 661 | CDK4 | GGGTTTTACGTGGTTGGA |
| | (SEQ ID NO: 70) | (SEQ ID NO: 1231) |
| 662 | CDK4 | GGGTTTTATGTGGTTGGA |
| | (SEQ ID NO: 70) | (SEQ ID NO: 1232) |
| 663 | CDK4 | TCCAACCACGTAAAACCC |
| | (SEQ ID NO: 70) | (SEQ ID NO: 1233) |
| 664 | CDK4 | TCCAACCACATAAAACCC |
| | (SEQ ID NO: 70) | (SEQ ID NO: 1234) |
| 665 | Humos | CCTTACTACGTTAAACTC |
| | (SEQ ID NO: 71) | (SEQ ID NO: 1155) |
| 666 | Humos | CCTTACTACATTAAACTC |
| | (SEQ ID NO: 71) | (SEQ ID NO: 1156) |
| 667 | Humos | GTTACCACCGAACTCCAT |
| | (SEQ ID NO: 71) | (SEQ ID NO: 1245) |
| 668 | Humos | GTTACCACCAAACTCCAT |
| | (SEQ ID NO: 71) | (SEQ ID NO: 1246) |
| 669 | Humos | CTCCCCTACGTCCCCCTC |
| | (SEQ ID NO: 71) | (SEQ ID NO: 1253) |
| 670 | Humos | CTCCCCTACATCCCCCTC |
| | (SEQ ID NO: 71) | (SEQ ID NO: 1254) |
| 671 | Humos | CTCCAATACGACAATAAA |
| | (SEQ ID NO: 71) | (SEQ ID NO: 1157) |
| 672 | Humos | CTCCAATACAACAATAAA |
| | (SEQ ID NO: 71) | (SEQ ID NO: 1158) |
| 673 | Humos | AAACAAACCGTTCACAAC |
| | (SEQ ID NO: 71) | (SEQ ID NO: 1251) |
| 674 | Humos | AAACAAACCATTCACAAC |
| | (SEQ ID NO: 71) | (SEQ ID NO: 1252) |
| 675 | CDC25A | GTGTAGGTCGGTTTGGTT |
| | (SEQ ID NO: 72) | (SEQ ID NO: 1159) |
| 676 | CDC25A | GTGTAGGTTGGTTTGGTT |
| | (SEQ ID NO: 72) | (SEQ ID NO: 1160) |
| 677 | CDC25A | AACCAAACCGACCTACAC |
| | (SEQ ID NO: 72) | (SEQ ID NO: 1161) |
| 678 | CDC25A | AACCAAACCAACCTACAC |
| | (SEQ ID NO: 72) | (SEQ ID NO: 1162) |
| 679 | CDC25A | TTGTTATTCGGAGTTGGG |
| | (SEQ ID NO: 72) | (SEQ ID NO: 1163) |
| 680 | CDC25A | TTGTTATTTGGAGTTGGG |
| | (SEQ ID NO: 72) | (SEQ ID NO: 1164) |
| 681 | CDC25A | CCCAACTCCGAATAACAA |
| | (SEQ ID NO: 72) | (SEQ ID NO: 1165) |
| 682 | CDC25A | CCCAACTCCAAATAACAA |
| | (SEQ ID NO: 72) | (SEQ ID NO: 1166) |
| 683 | CDC25A | TGGGTAAGCGGGTGGGAG |
| | (SEQ ID NO: 72) | (SEQ ID NO: 1167) |
| 684 | CDC25A | TGGGTAAGTGGGTGGGAG |
| | (SEQ ID NO: 72) | (SEQ ID NO: 1168) |
| 685 | CDC25A | CTCCCACCCGCTTACCCA |
| | (SEQ ID NO: 72) | (SEQ ID NO: 1169) |
| 686 | CDC25A | CTCCCACCCACTTACCCA |
| | (SEQ ID NO: 72) | (SEQ ID NO: 1170) |
| 687 | CDC25A | GAGAATAGCGAAGATAGC |
| | (SEQ ID NO: 72) | (SEQ ID NO: 1171) |
| 688 | CDC25A | GAGAATAGTGAAGATAGC |
| | (SEQ ID NO: 72) | (SEQ ID NO: 1172) |
| 689 | CDC25A | GCTATCTTCGCTATTCTC |
| | (SEQ ID NO: 72) | (SEQ ID NO: 1173) |
| 690 | CDC25A | GCTATCTTCACTATTCTC |
| | (SEQ ID NO: 72) | (SEQ ID NO: 1174) |
| 691 | CDC25A | TATTGAGTCGTTATTATC |
| | (SEQ ID NO: 72) | (SEQ ID NO: 1175) |
| 692 | CDC25A | TATTGAGTTGTTATTATC |
| | (SEQ ID NO: 72) | (SEQ ID NO: 1176) |
| 693 | CDC25A | GATAATAACGACTCAATA |
| | (SEQ ID NO: 72) | (SEQ ID NO: 1177) |
| 694 | CDC25A | GATAATAACAACTCAATA |
| | (SEQ ID NO: 72) | (SEQ ID NO: 1178) |
| 695 | CMYCex3 | GAAGAAATCGATGTTGTT |
| | (SEQ ID NO: 73) | (SEQ ID NO: 1179) |
| 696 | CMYCex3 | GAAGAAATTGATGTTGTT |
| | (SEQ ID NO: 73) | (SEQ ID NO: 1180) |
| 697 | CMYCex3 | AGGTGTTACGTTTTTATA |
| | (SEQ ID NO: 73) | (SEQ ID NO: 1181) |
| 698 | CMYCex3 | AGGTGTTATGTTTTTATA |
| | (SEQ ID NO: 73) | (SEQ ID NO: 1182) |
| 699 | CMYCex3 | TTTTTATTCGGAAGGATT |
| | (SEQ ID NO: 73) | (SEQ ID NO: 1183) |
| 700 | CMYCex3 | TTTTTATTTGGAAGGATT |
| | (SEQ ID NO: 73) | (SEQ ID NO: 1184) |
| 701 | CMYCex3 | GTAATAATCGAAAATGTA |
| | (SEQ ID NO: 73) | (SEQ ID NO: 1185) |
| 702 | CMYCex3 | GTAATAATTGAAAATGTA |
| | (SEQ ID NO: 73) | (SEQ ID NO: 1186) |
| 703 | CMYCex3 | TTAAGAGGCGAATATATA |
| | (SEQ ID NO: 73) | (SEQ ID NO: 1187) |
| 704 | CMYCex3 | TTAAGAGGTGAATATATA |
| | (SEQ ID NO: 73) | (SEQ ID NO: 1188) |
| 705 | CMYCex3 | ATATATAACGTTTTGGAG |
| | (SEQ ID NO: 73) | (SEQ ID NO: 1189) |
| 706 | CMYCex3 | ATATATAATGTTTTGGAG |
| | (SEQ ID NO: 73) | (SEQ ID NO: 1190) |
| 707 | CMYCex3 | TTTTGGAGCGTTAGAGGA |
| | (SEQ ID NO: 73) | (SEQ ID NO: 1191) |
| 708 | CMYCex3 | TTTTGGAGTGTTAGAGGA |
| | (SEQ ID NO: 73) | (SEQ ID NO: 1192) |
| 709 | CMYCex3 | AGGAGGAACGAGTTAAAA |
| | (SEQ ID NO: 73) | (SEQ ID NO: 1193) |
| 710 | CMYCex3 | AGGAGGAATGAGTTAAAA |
| | (SEQ ID NO: 73) | (SEQ ID NO: 1194) |
| 711 | CMYCex3 | AGTTAAAACGGAGTTTTT |
| | (SEQ ID NO: 73) | (SEQ ID NO: 1195) |
| 712 | CMYCex3 | AGTTAAAATGGAGTTTTT |
| | (SEQ ID NO: 73) | (SEQ ID NO: 1196) |
| 713 | CMYCex3 | TTGTTTTGCGTGATTAGA |
| | (SEQ ID NO: 73) | (SEQ ID NO: 1197) |
| 714 | CMYCex3 | TTGTTTTGTGTGATTAGA |
| | (SEQ ID NO: 73) | (SEQ ID NO: 1198) |
| 715 | CMYCex3 | TTAGATTTCGGAGTTGGA |
| | (SEQ ID NO: 73) | (SEQ ID NO: 1199) |
| 716 | CMYCex3 | TTAGATTTTGGAGTTGGA |
| | (SEQ ID NO: 73) | (SEQ ID NO: 1200) |
| 717 | CMYCex3 | ATTTTGTTCGTTTAAGTA |
| | (SEQ ID NO: 73) | (SEQ ID NO: 1201) |
| 718 | CMYCex3 | ATTTTGTTTGTTTAAGTA |
| | (SEQ ID NO: 73) | (SEQ ID NO: 1202) |
| 719 | CMYCex3 | AATAGTTACGGAATTTTT |
| | (SEQ ID NO: 73) | (SEQ ID NO: 1203) |
| 720 | CMYCex3 | AATAGTTATGGAATTTTT |
| | (SEQ ID NO: 73) | (SEQ ID NO: 1204) |
| 721 | CMYCex3 | TTTTTGTGCGTAAGGAAA |
| | (SEQ ID NO: 73) | (SEQ ID NO: 1205) |
| 722 | CMYCex3 | TTTTTGTGTGTAAGGAAA |
| | (SEQ ID NO: 73) | (SEQ ID NO: 1206) |
| 723 | CMYCex3 | AAGGAAAACGATTTTTTT |
| | (SEQ ID NO: 73) | (SEQ ID NO: 1207) |
| 724 | CMYCex3 | AAGGAAAATGATTTTTTT |
| | (SEQ ID NO: 73) | (SEQ ID NO: 1208) |
| 725 | CMYCex3 | TGAGTAATCGTTTATGAA |
| | (SEQ ID NO: 73) | (SEQ ID NO: 1209) |
| 726 | CMYCex3 | TGAGTAATTGTTTATGAA |
| | (SEQ ID NO: 73) | (SEQ ID NO: 1210) |

[0117] TABLE 4

Hybridisation olinonucleotides used in the
differentiation between healthy and leukemia
cells (FIG. 3)

| | | |
|---|---|---|
| No: | Gene | Oligo: |

| | | |
|---|---|---|
| 1 | Humos | GTTACCACCGAACTCCAT |
| | (SEQ ID NO: 71) | (SEQ ID NO: 1245) |
| 2 | Humos | GTTACCACCAAACTCCAT |
| | (SEQ ID NO: 71) | (SEQ ID NO: 1246) |
| 3 | Humos | GTTACCACCGAACTCCAT |
| | (SEQ ID NO: 71) | (SEQ ID NO: 1245) |
| 4 | Humos | GTTACCACCAAACTCCAT |
| | (SEQ ID NO: 71) | (SEQ ID NO: 1246) |
| 5 | CDK 4 | TTTAAGGGCGGGAAGTGG |
| | (SEQ ID NO: 70) | (SEQ ID NO: 1247) |
| 6 | CDK 4 | TTTAAGGGTGGGAAGTGG |
| | (SEQ ID NO: 70) | (SEQ ID NO: 1248) |
| 7 | CDK 4 | CCACTTCCCGCCCTTAAA |
| | (SEQ ID NO: 70) | (SEQ ID NO: 1249) |
| 8 | CDK 4 | CCACTTCCCACCCTTAAA |
| | (SEQ ID NO: 70) | (SEQ ID NO: 1250) |
| 9 | CDK 4 | TTTAAGGGCGGGAAGTGG |
| | (SEQ ID NO: 70) | (SEQ ID NO: 1247) |
| 10 | CDK 4 | TTTAAGGGTGGGAAGTGG |
| | (SEQ ID NO: 70) | (SEQ ID NO: 1248) |
| 11 | CDK 4 | CCACTTCCCGCCCTTAAA |
| | (SEQ ID NO: 70) | (SEQ ID NO: 1249) |
| 12 | CDK 4 | CCACTTCCCACCCTTAAA |
| | (SEQ ID NO: 70) | (SEQ ID NO: 1250) |
| 13 | Humos | AAACAAACCGTTCACAAC |
| | (SEQ ID NO: 71) | (SEQ ID NO: 1251) |
| 14 | Humos | AAACAAACCATTCACAAC |
| | (SEQ ID NO: 71) | (SEQ ID NO: 1252) |
| 15 | Humos | AAACAAACCGTTCACAAC |
| | (SEQ ID NO: 71) | (SEQ ID NO: 1251) |
| 16 | Humos | AAACAAACCATTCACAAC |
| | (SEQ ID NO: 71) | (SEQ ID NO: 1252) |
| 17 | Humos | CTCCCCTACGTCCCCCTC |
| | (SEQ ID NO: 71) | (SEQ ID NO: 1253) |
| 18 | Humos | CTCCCCTACATCCCCCTC |
| | (SEQ ID NO: 71) | (SEQ ID NO: 1254) |
| 19 | Humos | CTCCCCTACGTCCCCCTC |
| | (SEQ ID NO: 71) | (SEQ ID NO: 1253) |
| 20 | Humos | CTCCCCTACATCCCCCTC |
| | (SEQ ID NO: 71) | (SEQ ID NO: 1254) |
| 21 | AR | GTAGTATTCGAAGGTAGT |
| | (SEQ ID NO: 69) | (SEQ ID NO: 1255) |
| 22 | AR | GTAGTATTTGAAGGTAGT |
| | (SEQ ID NO: 69) | (SEQ ID NO: 1256) |
| 23 | AR | ACTACCTTCGAATACTAC |
| | (SEQ ID NO: 69) | (SEQ ID NO: 1257) |
| 24 | AR | ACTACCTTCAAATACTAC |
| | (SEQ ID NO: 69) | (SEQ ID NO: 1258) |
| 25 | AR | GTAGTATTCGAAGGTAGT |
| | (SEQ ID NO: 69) | (SEQ ID NO: 1255) |
| 26 | AR | GTAGTTATTTGAAGGTAGT |
| | (SEQ ID NO: 69) | (SEQ ID NO: 1256) |
| 27 | AR | ACTACCTTCGAATACTAC |
| | (SEQ ID NO: 69) | (SEQ ID NO: 1257) |
| 28 | AR | ACTACCTTCAAATACTAC |
| | (SEQ ID NO: 69) | (SEQ ID NO: 1258) |

[0118] TABLE 3

Hybridisation olinonucleotides used in differen-
tiation between acute lymphocytic leukemia and
acute myelogenous leukemia (FIGS. 5 and 6).

| | | |
|---|---|---|
| No: | Gene | Oligo: |

| | | |
|---|---|---|
| 1 | N33 | TTGGTTCGGGAAAGGTAA |
| | (SEQ ID NO: 46) | (SEQ ID NO: 1211) |
| 2 | N33 | TTGGTTTGGGAAAGGTAA |
| | (SEQ ID NO: 46) | (SEQ ID NO: 1212) |
| 3 | EGR4 | GGTGGGAAGCGTATTTAT |
| | (SEQ ID NO: 26) | (SEQ ID NO: 1213) |
| 4 | EGR4 | GGTGGGAAGTGTATTTAT |
| | (SEQ ID NO: 26) | (SEQ ID NO: 1214) |
| 5 | N33 | ATTTAGTTCGGGGGAGGA |
| | (SEQ ID NO: 46) | (SEQ ID NO: 1215) |
| 6 | N33 | ATTTAGTTTGGGGGAGGA |
| | (SEQ ID NO: 46) | (SEQ ID NO: 1216) |
| 7 | N33 | TGTTATTTCGGAGGGTTT |
| | (SEQ ID NO: 46) | (SEQ ID NO: 1217) |
| 8 | N33 | TGTTATTTTGGAGGGTTT |
| | (SEQ ID NO: 46) | (SEQ ID NO: 1218) |
| 9 | N33 | GTTTAGTTAGCGGGTTTT |
| | (SEQ ID NO: 46) | (SEQ ID NO: 1219) |
| 10 | N33 | GTTTAGTTAGTGGGTTTT |
| | (SEQ ID NO: 46) | (SEQ ID NO: 1220) |
| 11 | Humos | GAGTTTAACGTAGTAAGG |
| | (SEQ ID NO: 71) | (SEQ ID NO: 1221) |
| 12 | Humos | GAGTTTAATGTAGTAAGG |
| | (SEQ ID NO: 71) | (SEQ ID NO: 1222) |
| 13 | SDC4 | TTTTTATATCGGGTGTGTT |
| | (SEQ ID NO: 54) | (SEQ ID NO: 1223) |
| 14 | SDC4 | TTTTATATTGGGTGTGTT |
| | (SEQ ID NO: 54) | (SEQ ID NO: 1224) |
| 15 | EGR4 | TTATAGTTCGAGTTTTTT |
| | (SEQ ID NO: 26) | (SEQ ID NO: 1225) |
| 16 | EGR4 | TTATAGTTTGAGTTTTTT |
| | (SEQ ID NO: 26) | (SEQ ID NO: 1226) |
| 17 | MPL | TGTAGTGAGTCGAGATTA |
| | (SEQ ID NO: 42) | (SEQ ID NO: 1227) |
| 18 | MPL | TGTAGTGAGTTGAGATTA |
| | (SEQ ID NO: 42) | (SEQ ID NO: 1228) |
| 19 | TP73 | TTTGGTGCGCGTAGAGAA |
| | (SEQ ID NO: 58) | (SEQ ID NO: 1229) |
| 20 | TP73 | TTTGGTGTGTGTAGAGAA |
| | (SEQ ID NO: 58) | (SEQ ID NO: 1230) |
| 21 | CDK 4 | GGGTTTTACGTGGTTGGA |
| | (SEQ ID NO: 70) | (SEQ ID NO: 1231) |
| 22 | CDK 4 | GGGTTTTATGTGGTTGGA |
| | (SEQ ID NO: 70) | (SEQ ID NO: 1232) |
| 23 | CDK 4 | TCCAACCACGTAAAACCC |
| | (SEQ ID NO: 70) | (SEQ ID NO: 1233) |
| 24 | CDK 4 | TCCAACCACATAAAACCC |
| | (SEQ ID NO: 70) | (SEQ ID NO: 1234) |
| 25 | CDK 4 | GGGTTTTACGTGGTTGGA |
| | (SEQ ID NO: 70) | (SEQ ID NO: 1231) |
| 26 | CDK 4 | GGGTTTTATGTGGTTGGA |
| | (SEQ ID NO: 70) | (SEQ ID NO: 1232) |
| 27 | CDK 4 | TCCAACCACGTAAAACCC |
| | (SEQ ID NO: 70) | (SEQ ID NO: 1233) |
| 28 | CDK 4 | TCCAACCACATAAAACCC |
| | (SEQ ID NO: 70) | (SEQ ID NO: 1234) |
| 29 | CSNK2B | AGGAGTTTCGGAGGAAAT |
| | (SEQ ID NO: 67) | (SEQ ID NO: 1235) |
| 30 | CSNK2B | AGGAGTTTTGGAGGAAAT |
| | (SEQ ID NO: 67) | (SEQ ID NO: 1236) |
| 31 | CSNK2B | ATTTCCTCCGAAACTCCT |
| | (SEQ ID NO: 67) | (SEQ ID NO: 1237) |
| 32 | CSNK2B | ATTTCCTCCAAAACTCCT |
| | (SEQ ID NO: 67) | (SEQ ID NO: 1238) |
| 33 | CSNK2B | AGGAGTTTCGGAGGAAAT |
| | (SEQ ID NO: 67) | (SEQ ID NO: 1235) |
| 34 | CSNK2B | AGGAGTTTTGGAGGAAAT |
| | (SEQ ID NO: 67) | (SEQ ID NO: 1236) |
| 35 | CSNK2B | ATTTCCTCCGAAACTCCT |
| | (SEQ ID NO: 67) | (SEQ ID NO: 1237) |
| 36 | CSNK2B | ATTTCCTCCAAAACTCCT |
| | (SEQ ID NO: 67) | (SEQ ID NO: 1238) |
| 37 | Tubulin | TACTTCAACGTCCTAATA |
| | (SEQ ID NO: 64) | (SEQ ID NO: 1239) |
| 38 | Tubulin | TACTTCAACATCCTAATA |
| | (SEQ ID NO: 64) | (SEQ ID NO: 1240) |
| 39 | Tubulin | TACTTCAACGTCCTAATA |
| | (SEQ ID NO: 64) | (SEQ ID NO: 1239) |
| 40 | Tubulin | TACTTCAACATCCTAATA |
| | (SEQ ID NO: 64) | (SEQ ID NO: 1240) |
| 41 | ELK1 | TTTATTTTCGTTTTTGGG |
| | (SEQ ID NO: 63) | (SEQ ID NO: 1241) |
| 42 | ELK1 | TTTATTTTTGTTTTTGGG |
| | (SEQ ID NO: 63) | (SEQ ID NO: 1242) |
| 43 | ELK1 | TTTATTTTCGTTTTTGGG |
| | (SEQ ID NO: 63) | (SEQ ID NO: 1241) |
| 44 | ELK1 | TTTATTTTTGTTTTTGGG |
| | (SEQ ID NO: 63) | (SEQ ID NO: 1242) |
| 45 | Tubulin | CAATACTCCGTCCATTAA |
| | (SEQ ID NO: 64) | (SEQ ID NO: 1243) |
| 46 | Tubulin | CAATACTCCATCCATTAA |
| | (SEQ ID NO: 64) | (SEQ ID NO: 1244) |
| 47 | Tubulin | CAATACTCCGTCCATTAA |
| | (SEQ ID NO: 64) | (SEQ ID NO: 1243) |
| 48 | Tubulin | CAATACTCCATCCATTAA |
| | (SEQ ID NO: 64) | (SEQ ID NO: 1244) |

### DESCRIPTION OF THE FIGURES

[0119] FIG. 1

[0120] Methylation analysis and quantification of two CpG dinucleotides in exon 14 of the human factor VIII gene. For calibration purpose a series of hybridisations was performed with mixtures of artificially up- and down-methylated DNA fragments of the factor VIII exon 14 gene. Down- and up-methylated DNA fragments were mixed at ratios: 0:3, 1:2, 2:1, 3:0, representing a methylation status of 100%, 66%, 33% and 0%, respectively. A, Methylation detection by oligonucleotide microarray hybridisation. The fluorescence signals of the CG and TG version of the factor VIII exon 14 oligonucleotides F8-5 (TTATTAACGGGAAATAAT, TTATTAATGGGAAATAAT) and F8-3 (AATAAGTTCGAAATAGAA, AATAAGTTTGAAATAGAA) are shown which are generated by samples reflecting the methylation status 0%, 33%, 66% and 100%. The hybridisation signals are shown in a false colour image with the colours blue, green and yellow indicating fluorescence signal ranges at 635 nm of 200 to 800, 800 to 2000 and 2000 to 8000, respectively. B, Distribution and probability of measurement of different methylated DNA for two CpG methylation. For each CpG position two kinds of detection oligomers were used. Oligomers that hybridise if the CpG was methylated are referred to as CG oligomer and the oligomers that hybridise if the CpG was not methylated are referred to as TG oligos. For the 4 kinds of compounds 59, 36, 40, 63 identical slides were made. The log-ratio of the CG and the TG detection oligomer hybridisation intensity was calculated and then averaged for experimental subgroups each containing 3 identical experiments. The distribution function of the CG:TG ratios shows that measurement values of the different mixtures are well separated and therefore allow a high resolution detection of the methylation level of a single CpG. This is an essential prerequisite for methylation dependent class prediction or class discovery. Taking into account only the 100% and 0% methylated DNA, and averaging for the 22 CpG sites investigated in the calibration experiments, the average error for methylation detection is 4%. The log-ratios are not grouped symmetrically around zero but shifted towards negative values. We assume that the energetically different effects of G-T and A-C mismatches allow hybridisations of the methylated allele to the oligonucleotide representing the unmethylated more easily than vice versa.

[0121] FIG. 2

[0122] Gender separation and CpG site prediction of ALL/AML and healthy blood samples. High probability of methylation corresponds to red, uncertainty to black and low probability to green. The labels on the left side of the plot are gene and CpG identifiers. The labels on the right side give the significance of the difference between the means of the two groups. Each row corresponds to a single CpG and each column to the methylation levels of one sample.

[0123] FIG. 2A, Gender separation. The 20 CpG sites with the most significant difference between female and male samples are shown. Only non cell lines were used. As expected the significant CpG dinucleotides come from the two X-chromosome genes (ELK1, AR).

[0124] FIG. 2B, differentiation between healthy samples and ALL samples. The 54 CpG sites with the most significant difference between healthy and ALL samples are shown. High probability of methylation corresponds to red, uncertainty to black and low probability to green. The labels on the left side of the plot are gene and CpG identifiers. The labels on the right side give the significance of the difference between the means of the two groups. Each row corresponds to a single CpG and each column to the methylation levels of one sample.

[0125] FIG. 2C shows FIG. 2B reproduced in greyscale. High probability of methylation corresponds to black, uncertainty to grey and low probability to white. The labels on the left side of the plot are gene and CpG identifiers. The labels on the right side give the significance of the difference between the means of the two groups. Each row corresponds to a single CpG and each column to the methylation levels of one sample.

[0126] Legend FIG. 2A:

[0127] 1—Female

[0128] 2—Male

[0129] Legend FIG. 2B:

[0130] 1—Healthy

[0131] 2—ALL

[0132] FIG. 3

[0133] Class prediction and class discovery of blood samples. A, The plot shows a SVM trained on the two most significant CpG sites for the healthy-ALL discrimination using all available healthy and ALL samples as training data. The red points are healthy, the yellow ones ALL samples. Circled points are the support vectors defining the white borderline between the green area of healthy prediction and the blue area of an ALL prediction. The colour intensity corresponds to the prediction strength. B, Support Vector Machine for AML-ALL class prediction. The red points are ALL, the yellow ones AML samples. Circled points are the support vectors defining the white borderline between the green area of ALL prediction and the blue area of an AML prediction. The colour intensity corresponds to the prediction strength. C, Class discovery. The figure shows a hierarchical clustering of all available samples. Healthy individuals are coloured green, patients with ALL red and patients with AML blue. Asterisks indicate cell line samples. The feature space consisted of all CpG sites except those from the two X-chromosomal genes. The diagnosis was unknown to the algorithm.

[0134] Legend FIG. 3A: t-Test ranking (Healty vs. ALL)

[0135] 1—MOS CpG5

[0136] 2—CDK4 CpG2

[0137] Legend FIG. 3B: t-Test ranking (AML vs. ALL)

[0138] 1—CSNK2B CpG2

[0139] 2—CDK4 CpG10

[0140] FIG. 4: Feature selection methods.

[0141] FIG. 4A shows principle component analysis. The entire data set was projected onto its first 2 principle components. Circles represent cell lines, triangles primary patient tissue. Filled circles or triangles are AML, empty ones ALL samples.

[0142] FIG. 4B: Fisher criterion. The 20 highest ranking CpG sites according to the Fisher criterion are shown. The highest ranking features are on the bottom of the plot. High probability of methylation corresponds to black, uncertainty to grey and low probability to white.

[0143] FIG. 4C: Two sample t-test.

[0144] FIG. 4D: Backward elimination.

[0145] FIG. 5

[0146] Support Vector Machine on two best features of the Fisher criterion. The plot shows a SVM trained on the two highest ranking CpG sites according to the Fisher criterion with all ALL and AML samples used as training data. The black points are AML, the grey ones ALL samples. Circled points are the support vectors defining the white borderline between

[0147] the areas of AML and ALL prediction. The grey value of the background corresponds to the prediction strength.

[0148] Legend FIG. 5:

[0149] 1—CSNK2B CpG2

[0150] 2—CDK4 CpG3

[0151] FIG. 6

[0152] Dimension dependence of feature selection performance. The plot shows the generalisation performance of a linear SVM with four different feature selection methods against the number of selected features. The x-axis is scaled logarithmically and gives the number of input features for the SVM, starting with two. The y-axis gives the achieved generalisation performance. Note that the maximum number of principle components corresponds to the number of available samples.

[0153] Legend FIG. 6:

[0154] 1—Feature Number

[0155] 2—Test Error

[0156] 3—Fisher Criterion

[0157] 4—t-Test

[0158] 5—Backward Elimination

[0159] 6—Principle Component Analysis

[0160] FIG. 7A

[0161] Differentiation between healthy and acute lymphocytic leukemia samples. High probability of methylation corresponds to red, uncertainty to black and low probability to green. The labels on the left side of the plot are gene and CpG identifiers. The labels on the right side give the significance of the difference between the means of the two groups. Each row corresponds to a single CpG and each column to the methylation levels of one sample.

[0162] FIG. 7B

[0163] Differentiation between acute lymphocytic leukemia and acute myelogenous leukemia, this shows FIG. 7A reproduced in greyscale. High probability of methylation corresponds to black, uncertainty to grey and low probability to white. The labels on the left side of the plot are gene and CpG identifiers. The labels on the right side give the significance of the difference between the means of the two groups. Each row corresponds to a single CpG and each column to the methylation levels of one sample.

[0164] FIG. 8A

[0165] Differentiation between acute lymphocytic leukemia and acute myelogenous leukemia samples. High probability of methylation corresponds to red, uncertainty to black and low probability to green. The labels on the left side of the plot are gene and CpG identifiers. The labels on the right side give the significance of the difference between the means of the two groups. Each row corresponds to a single CpG and each column to the methylation levels of one sample.

[0166] FIG. 8B

[0167] Differentiation between acute lymphocytic leukemia and acute myelogenous leukemia, this shows FIG. 8A reproduced in greyscale. High probability of methylation corresponds to red, uncertainty to black and low probability to green. The labels on the left side of the plot are gene and CpG identifiers. The labels on the right side give the significance of the difference between the means of the two groups. Each row corresponds to a single CpG and each column to the methylation levels of one sample.

1. A method for detecting and differentiating between hematopoietic cell proliferative disorders associated with at least one gene and/or their regulatory regions from the group comprising ABL1, ABL1, APAF1, APC, AR, ARHI, BAK1, BAX, BCL2, CASP10, CASP8, CASP9, CCND2, CDC2, CDC25A, CDH1, CDH3, CDK4, CDKN1A, CDKN1B (p27Kip1), CDKN1C, CDKN2a, CDKN2B, CSNK2B, DAPK1, EGR4, ELK1, ESR1, FOS, GPIb beta, GRP37, GSK3β, GSTP1, HIC-1, HOXA5, IGF2, MDR1, MGMT, MLH1, MOS, Humos, MPL, MYC, MYCL1, MYOD1, N33, PITX2, PML, PMS2, PRAME, PTEN, RB1, RBL2, SDC4, SFN, TCL1A, TGFBR2, TP73, WT1, N-MYC, L-MYC, C-ABL, ELK1, Tubulin, CSF1, CD1R3, CSNK2B, Me491/TD63, AR, CDK 4, Humos, CDC25A, CMYCex3 in a subject, said method comprising contacting a target nucleic acid in a biological sample obtained from said subject with at least one reagent or a series of reagents, wherein said reagent or series of reagents, distinguishes between methylated and non methylated CpG dinucleotides within the target nucleic acid.

2. A method according to claim 1 wherein, said method differentiates between normal hematopoietic cells and proliferative disorder hematopoietic cells.

3. A method according to claim 1, wherein said method differentiates between acute lymphocytic leukemia and acute myelogenous leukemia.

4. Use of methods according to claim 1 wherein, CDKN1A, CDK 4, AR are used to differentiate between healthy hematopoietic cells and proliferative disorder hematopietic cells.

5. Use of methods according to claim 1 wherein, N33, EGR4, CDKN1A, SDC4, MPL, TP 73, BAK 1, CSNK2B, ARH1, CASP 10 are used to differentiate between acute lymphocytic leukemia and acute myelogenous leukemia.

6. A method according to claim 1 comprising the following steps:
obtaining a biological sample containing genomic DNA;
extracting the genomic DNA;
converting cytosine bases in the genomic DNA sample which are unmethylated at the 5-position, by treatment, to uracil or another base which is dissimilar to cytosine in terms of base pairing behavior;
fragments of the pretreated genomic DNA are amplified;
identification of the methylation status of one or more cytosine positions.

7. The method according to claim 6, characterized in that the reagent is a solution of bisulfite, hydrogen sulfite or disulfite.

8. The method as recited in claim 6, characterized in that the amplification is carried out by means of the polymerase chain reaction (PCR).

9. The method as recited in one of the claim 6, characterized in that the amplification is carried out by means of a heat-resistant DNA polymerase.

10. The method as recited in claim 6, characterized in that more than ten different fragments having a length of 100-2000 base pairs are amplified.

11. The method as recited in claim 6, wherein the amplification step is carried out using a set of primer oligonucleotides comprising SEQ ID NO:387 through SEQ ID NO:534.

12. The method as recited claim 6, characterized in that the amplification of several DNA segments is carried out in one reaction vessel.

13. The method as recited in claim 6, characterized in that the amplification step preferentially amplifies DNA which is of particular interest in healthy and/or diseased hematopoietic cells, based on the specific genomic methylation status of hematopoietic cells, as opposed to background DNA.

14. The method according to claim 6, characterized in that the methylation status within at least one gene and/or their regulatory regions from the group comprising ABL1, ABL1, APAF1, APC, AR, ARHI, BAK1, BAX, BCL2, CASP10, CASP8, CASP9, CCND2, CDC2, CDC25A, CDH1, CDH3, CDK4, CDKN1A, CDKN1B (p27Kip1), CDKN1C, CDKN2a, CDKN2B, CSNK2B, DAPK1, EGR4, ELK1, ESR1, FOS, GPIb beta, GRP37, GSK3β, GSTP1, HIC-1, HOXA5, IGF2, MDR1, MGMT, MLH1, MOS, Humos, MPL, MYC, MYCL1, MYOD1, N33, PITX2, PML, PMS2, PRAME, PTEN, RB1, RBL2, SDC4, SFN, TCL1A, TGFBR2, TP73, WT1, N-MYC, L-MYC, C-ABL, ELK1, Tubulin, CSF1, CD1R3, CSNK2B, Me491/TD63, AR, CDK 4, Humos, CDC25A, CMYCex3 is detected by hybridization of each amplificate to an oligonucleotide or peptide nucleic acid (PNA)-oligomer.

15. A method according to claim 14, characterized in that the oligonucleotide or peptide nucleic acid (PNA)-oligomer is taken from the group comprising SEQ ID NO:535 to SEQ ID NO:1258.

16. The method according to claim 6, characterized in that the amplificates are labelled.

17. The method as recited in claim 16, characterized in that the labels of the amplificates are fluorescence labels.

18. The method as recited in claim 16, characterized in that the labels of the amplificates are radionuclides.

19. The method as recited in claim 16, characterized in that the labels of the amplificates are detachable molecule fragments having a typical mass which are detected in a mass spectrometer.

20. The method as recited claim 6, characterized in that the amplificates or fragments of the amplificates are detected in the mass spectrometer.

21. The method as recited in claim 19, characterized in that the produced fragments have a single positive or negative net charge.

22. The method as recited in claim 19, characterized in that detection is carried out and visualized by means of matrix assisted laser desorption/ionization mass spectrometry (MALDI) or using electron spray mass spectrometry (ESI).

23. A method according to claim 1 comprising the following steps;
a) obtaining a biological sample containing genomic DNA;
b) extracting the genomic DNA;
c) digesting the genomic DNA comprising at least one or more CpGs of the genes ABL1, ABL1, APAF1, APC, AR, ARHI, BAK1, BAX, BCL2, CASP10, CASP8, CASP9, CCND2, CDC2, CDC25A, CDH1, CDH3, CDK4, CDKN1A, CDKN1B (p27Kip1), CDKN1C, CDKN2a, CDKN2B, CSNK2B, DAPK1, EGR4, ELK1, ESR1, FOS, GPIb beta, GRP37, GSK3β, GSTP1, HIC-1, HOXA5, IGF2, MDR1, MGMT, MLH1, MOS, Humos, MPL, MYC, MYCL1, MYOD1, N33, PITX2, PML, PMS2, PRAME, PTEN, RB1, RBL2, SDC4, SFN, TCL1A, TGFBR2, TP73, WT1, N-MYC, L-MYC, C-ABL, ELK1, Tubulin, CSF1, CD1R3, CSNK2B, Me491/TD63, AR, CDK 4, Humos, CDC25A, CMYCex3 with one or more methylation sensitive restriction enzymes;
d) detection of the DNA fragments generated in the digest of step c).

24. A method according to claim 23, wherein the DNA digest is amplified prior to Step d.

25. The method as recited in claim 24, characterized in that the amplification is carried out by means of the polymerase chain reaction (PCR).

26. The method as recited in one of the claims claim 24 and/or 25, characterized in that the amplification of more than one DNA fragments is carried out in one reaction vessel.

27. The method as recited in one of the claims claim 24 though 26, characterized in that the polymerase is a heat-resistant DNA polymerase.

28. An isolated nucleic acid of a pretreated genomic DNA according to one of the sequences taken from the group comprising SEQ ID NO:95 to SEQ ID NO:386 and sequences complementary thereto.

29. An oligomer, in particular an oligonucleotide or peptide nucleic acid (PNA)-oligomer, said oligomer comprising at least one base sequence of at least 10 nucleotides which hybridizes to or is identical to a pretreated genomic DNA acccording to one of the SEQ ID NO:95 to SEQ ID NO:386 according to claim 28.

30. The oligonucleotide as recited in claim 29; wherein the base sequence includes at least one CpG or TpG dinucleotide sequence.

31. The oligonucleotide as recited in claim 30; characterized in that the cytosine of the at least one CpG or TpG dinucleotide is/are located approximately in the middle third of the oligomer.

32. An oligomer, in particular an oligonucleotide or peptide nucleic acid (PNA)-oligomer, according to one of the sequences taken from the group comprising SEQ ID NO:535 to SEQ ID NO: 1258.

33. A set of oligonucleotides, comprising at least two oligonucleotides according to claim 29.

34. A set of oligonucleotides, comprising at least two oligonucleotides according to SEQ ID NO:1245, 1245, 1246, 1246, 1247, 1247, 1248, 1248, 1249, 1249, 1250, 1250, 1251, 1251, 1252, 1252, 1253, 1253, 1254, 1254, 1255, 1255, 1256, 1256, 1257, 1257, 1258, 1258.

35. One or more isolated nucleic acid(s) taken from the group according to SEQ ID NO:88-94.

36. A set of oligonucleotides, comprising at least two oligonucleotides according to SEQ ID NO:1211-1231, 1231, 1232, 1232, 1233, 1233, 1234, 1234, 1235, 1235, 1236, 1236, 1237, 1237, 1238, 1238, 1239, 1239, 1240, 1240, 1241, 1241, 1242, 1242, 1243, 1243, 1244, 1244.

37. One or more isolated nucleic acid(s) taken from the group according to SEQ ID NO:74-87.

38. A set of oligomers, peptide nucleic acid (PNA)-oligomers and/or isolated nucleic acids as recited in claims 33 through 35 and 37, comprising oligomers for detecting the methylation state of all CpG dinucleotides within one or more of the sequences according to SEQ ID NO:1 to SEQ ID NO:73 and sequences complementary thereto.

39. Use of a set of oligomers or peptide nucleic acid (PNA)-oligomers according to any of claims 29 through 34 and 36 as probes for determining the cytosine methylation state and/or single nucleotide polymorphisms (SNPs) of sequences according to SEQ ID NO:1 to SEQ ID NO:73 and sequences complementary thereto.

40. Use of a set of oligonucleotides according to claim 34 or nucleic acid(s) according to claim 35 for the differentiation between healthy hematopoietic cells and proliferative disorder hematopoietic cells.

41. Use of a set of oligonucleotides according to claim 36 or nucleic acid(s) according to claim 37 for the differentiation between acute lymphocytic leukemia and acute myelogenous leukemia.

42. A set of at least two oligonucleotides or peptide nucleic acid (PNA)-oligomers as recited in claim 29, as primer oligonucleotides for the amplification of DNA sequences of one of SEQ ID NO:95 to SEQ ID NO:386 according to claim 28 and/or sequences complementary thereto and segments thereof.

43. Use of a pretreated genomic DNA according to claim 28 for the determination of the methylation status of a corresponding genomic DNA and/or detection of single nucleotide polymorphisms (SNPs).

44. A set of olignucleotides or peptide nucleic acid (PNA)-oligomers as recited in claims 33, 34 or 36 characterized in that at least one oligonucleotide is bound to a solid phase.

45. A set of oligonucleotides or peptide nucleic acid (PNA)-oligomers as recited in claims 33, 34 or 36, characterized in that all members of the set are bound to a solid phase.

46. A method for manufacturing an arrangement of different oligomers or peptide nucleic acid (PNA)-oligomers (array) for analyzing diseases associated with the corresponding genomic methylation status of the CpG dinucleotides within one of the SEQ ID NO:1 to SEQ ID NO:73 and sequences complementary thereto, wherein at least one oligomer according to any of the claims 33, 34 or 36 is coupled to a solid phase.

47. An arrangement of different oligomers or peptide nucleic acid (PNA)-oligomers (array) obtainable according to cams claim 44 and 45.

48. An array of different oligonucleotide- and/or PNA-oligomer sequences as recited in claim 47, characterized in that these are arranged on a plane solid phase in the form of a rectangular or hexagonal lattice.

49. A nucleic acid or peptide nucleic acid array for the analysis of hematopoeitic cell proliferative disorders associated with the methylation state of genes comprising at least one nucleic acid according to claim 48.

50. The array as recited in claim 47, characterized in that the solid phase surface is composed of silicon, glass, polystyrene, aluminum, steel, iron, copper, nickel, silver, or gold.

51. A kit comprising a bisulfite (=disulfite, hydrogen sulfite) reagent as well as oligonucleotides and/or PNA-oligomers according to one of the claims 29 through 37.

52. The use of oligonucleotides or peptide nucleic acid (PNA)-oligomers according to SEQ ID NO:74 to SEQ ID NO:94 and SEQ ID NO:535 to SEQ ID NO:1258 for the detection of a predisposition to, differentiation between subclasses, diagnosis, prognosis, treatment and/or monitoring of hematopoietic cell proliferative disorders.

53. A DNA sequence according to one of the sequences taken from the group comprising SEQ ID NO:95 to SEQ ID NO:386 and sequences complementary thereto for use in the analysis of cytosine methylation within said nucleic acid for the detection of a predisposition to, differentiation between subclasses, diagnosis, prognosis, treatment and/or monitoring of hematopoietic cell proliferative disorders.

The application's sequence listing, which the Patent Office published only in electronic form, follows.

SEQUENCE LISTING (1258 sequences)

SEQ ID NO: 1 - DNA, 3460 bp, Homo Sapiens
caagagcagaatattagtaataataattagcttaaaaaaataaacatataccaatataaagaacagcacaaggcaagcaaatatctgggcctatattaacagacggtattcaaggatatggctagaatttccaaaatgcctaataatgtgtaattcttggcattaagccgccaatttgaatatggccctttaatatgaaatgctatataatgacagactttattatagtctgatccaaggcccctgaactttccaaaagggcaacaaaacagacagatactgtattttttcactagttggtactggtggcacccttttgagtgttatttttggcattacgtgtagaggttgacagattcaagacaacactaaacatgttagcagtcaccacacgcaggctgtccagcagaatgacagcgcttcccagatcctagaaagcatccagagtcactgcacccatcccctgggggccctgtagtcctgcatctccagatgatgggagctgcaaacttccctgatggtgccctcttggatgctcatgaggcctgatctggtaccacgactctagcagtaggtccattcaatggcagtaaaaatacatgttgtatgttgatcagaatttggcaggacacatgtggaaagttaatgacatcctggccgagaacccctgtgatatacactggttacatcctgtccaactggagtttttatgtgctgtttttggcagagccaagtgaagatcttgttacttagccattcctgaggtactgaagatacccgggtttttgtcattacaggataggctagaaagtagccagggtctcataaccaaggctttctctgaaacatataatgacaatgctagttatttgaccaaagatatccaatgctttaatccacttggaatttattcttgatgtgaagggtcagcatcatccactggtcgggagcctgatccttggagccaggcagacctgggttgagtccatctccgcctgtttccagctgtgggcaaggtgtctgacttctctgagcatctgtggggtttgtttgtttttaaacctgaagaattgggataatctgtttcctcacagaatcattacgcagatgcaatacagttaatgaaggtaacatggcacataggaagagcacaatacacgtcagctcttactcttcatggctagaagatgtggactaaacttccccctttacagttttgtgattaacaccatttatgaaagaaataaatgaaataaattccttttcctgtcatgaggggaacttacctgattttattgaattatttggtgccattgagttccttattgtttccctctgacctagatttctgggtgtgcgccagtaacacgactgtgattgttgctgctttataacattgtctgtggtcagtccaaacaagagtttaaaataattgaatgaaatggattttaaacaatggtccccccaccctcaccccgtggcactcggccaaaggaagaggaaaagttctctgttaaagaaaatgaatcagagaagaggcccagaccgtgcctccgaaaattctcattgtagggactaagtcctctcactctgaactcacacccgtctgttcgcagcctgacctcatatcctggtctggatgtgcggcctcaccggggtgtcgtgcgcacgtgtggttgtcctgtgggtgccagctctgacttcctccccagacacccactgcctcagccttaatcacaggacgcgcgttgagtagaaatgagaccagttagtattggtaactgcagaggaatatgcattttcaccagcgttctcgggtcagagggtttgcctggcaccgcgtactgggaaactcgccaaaagcggtgcaggttggagacgccccaggccgcggtggagttgcgcgcggcttctaaagtggagtggagcaggcctgcaccctccccgccggggctgggacggcgcttccaggcggagaaagacctccgcgggccgcgcgcggccttccccctgcgaggatcgccattggcccgggttggctttggaaagcggcggtggctttgggccgggctcggcctcgggaacgccaggggcccctgggtgcggacgggcgcggccaggagggggttaaggcgcaggcggcggcggggcgggggcgggcctggcgggcgccctctccgggccctttgttaacaggcgcgtcccggccaggcggagacgcggccgcggccatgggcgggcgcgggcgcgcggggcggcggtgagggcggctggcggggccgggggcgccgggggggcgcgcgggccgagccgggcctgagccgggcccgcggaccgagctgggagaggggttccggcccccgacgtgctggcgcgggaaaatgttggagatctgcctgaagctggtgggctgcaaatccaagaaggggctgtcctcgtcctccagctgttatctggaaggtaagcccgggccgcacgggttgggctgagtagccgcgcgccctcccgctgctgctgggcccttcctaggcctcgccgcccgcgcgctcccgcctgcgccctccccgggtcttgtcttttttttctttcttccctcttctcttctcttctcttcagttctcttatattctgtctctctttctttctctctgtgtctgtctcttttctcttctcttgtctctctctttttctctctctctgtctctttctctttctcgcgatggcccctaggcgccgccggcggagcgtggcccccagccccggcaccagccccggtagagccacgccggatggtgacggcggcgtccggggccccacagtgcgggctcccccgaaaaagtttgagaaagccaactcgccaggccttaacatccctgggatcccacgttgtggaatttccaccgttaattgggactgtgtgttaaaaagatcgacccgtgtttgtgaaaacatgcgatttccattaagcatcatgtacacaaggagcaccactctaccatttatggatacagaatttcaagtgatctttccatctcccccacccccatcttatctacagaccacgaagaggtcttaggaattcgctctcttttcaggggaggggagcccatttaagaaggcgtttccaaggagtcccccagagtactggggtgtcatgttcgtttccttaagtgaagctcagggccaggagggcttcacttttgcgttctttctacctactctccttctctaattacatctgttttattttatttttctttcctgttgtagtctttagttttataaatggaaaaaaagtaaattaagggttatgggtcttcactttcgtagcttctaggtgggtatgaaattgatctgatttgagactggtgctcccagaccattgccttcagcagaaaggctatctgtgcttcagagatggagtggcacttggacttctctgttgttttcaactaagaat

SEQ ID NO: 2 - DNA, 35962 bp, Homo Sapiens
gatcatgttaccagtgaataaaaacacttttacctgttccatcctaattgggatgtcttttatttctttttcttgccttattgcatggtccaagacctccagcaatagaagattctagatagaggccaatgatctgggtctgaaactccactctgccattcactagctgtgtgatcttgggcaagtcaattaatatctctgtgcctcaggttcctcacatgtaaagtggagtgatatttagctcctaaggttgacatgaggatcaaatgggataatgtctatatgtgaatacatacatgactcagtgcttggcacatagtatgtgctcaataaattggaatctttgttaatacaagcatgcctttggcgggtgagaagggtggcagatgctcctaccactcaccccactgggcagcccccagaggacatctgaggcagctgtttgcactcccttccttcagccctttctgatgcccattcttttttttttttttttttttttagacggagtcttgctctgtctcctaggctggagtgcagtggcacgatctcagctcactgcaacctctgcctgctcagttcaagcaattctcctattctcctgcctcagcctctcaagtagctgtgactacaggcatgcaccactatgcccggctaattttttatatttttagtagagatagggtttcaccacattggccaggctggtctcgaactcctgacctcccaaagtgctgggattacagatgtgagccaccgcgctcggccgatgcccactattcttgaatcccttgaactagaggaacggacactctgagtttccagcttccctcctgccttgcaggtggcctgctgggatgtatgtctgtggatgagcagaggaagttatggacagtggcaggttagttgccaggcatggctgtttcttcacaatatgattgcctcaggatagtcagacttcttatgtgtcagctcagggcttcaaaggcaagtgtttcaagagaaccaggagggccgggcgcagtggctcacgcctgtaatctcagcactttgggaggccgaggcgggcggatcatgaggtcaggagattgagaccattctggctaacatggtgaaaccccatctctactaaaaacacaaacaattagccaggcgtggtggcgggtgcctgtagtcccagctactcaggaggctgaggcaggagaatggcatgaatctgggaggtggagcttgcagtgagctgagatcaggccactgcactccagcctgggctacagagtgagactctgtctcaaaaaaaaaaaaaaaaaaaaaaaaaaaaggagaaccaggaggaagtggcatggtctattctgacctagcttttgaagtcacacagaggcatttctgacatatgctgtccatcaaagcagtcagaatcctgtcctgtggcaggagaggatgcacagaacccacttctttttttttttttttttttttttaatacggagttttgctcttcttgcccaggctgcggtgcagtggcacaatctcggctcactgcaacctctgcctcctgggttcgagcaattctcctgcctcagcctcccgagtagctgggattacaggcgcctgccaccacacctggctaattttgtgtttttagtagagacggggttttaccatgttggtgaggctggtctcgagctcccgacctcaagtgatccaccggcctcagcctcccaaagtgctgggattacaggcctgagccaccactcctggccagaccccacttcttgattgaagaagtatgaaaatattcagggacatgcttaatatgaccatagacattgacactgtttctaatactttcagaacaagtgatgctttgatgagcatccttaggctgaaatctgtgtgcacgtctctgcttagaaagtttatgcagttggccaggcgtagtggttcacgcctatagtcccagcactttgggaggcacaggtgggcggatcacttgaggctgggagttcgacaccagcctggccaacatggggaaaccccagctctactgaaaatataaaaattagctgggcgtggtggcaggcgcctataatcccacctacttgggaggctgaggcacaagaatcacttgagcctgggaagtggaagttgcagtgcgccaagatcgcaccattgtactccagcgagactctgtctcaaaaaaaaaaaaaaaaaaaggtttatgcagttatttttaccattttactatttcaatggaacacgaggtgaacccagtaggtagatgaggattgaaccaagagttttgggctagagagtccctgctgcctctgttttcatgtttttcagaatttccttgccagttactttcacctggagttcacctgttccccaccccaactcctcagggtccatggttccctcatttcaaggctcattcaaatgcttcctctgtcaggcaagcttttctgtctgtcctccctctcccttccccatctttgaacatcttagcactttgatgactggggcctcaaatgatccagctctgtggtcccacagcacatagctggtgcccagcaaatgcctgctgaaaaagtttattcatcaattcaacagagatttactgagagatttgttgttgttgttgttgtttgtttgtttgttttaatggagtctcactctgtcaaccaggcttgagtggaatggcacaatctcggctcactgcaacctccacctcccaggttcaagcaattctcctgtctcagccccttgagtagctgagattacaggcacctgccaccatgcccggctaatttttgtatttttagtagagatagtgtttcaccatgttggccaggctggtcttgaactcctgacctcaagtgatccacccacccagcctcctacagagctgggattacagacgtgagccactgcgcccagcagagagctgtttcaagggtcctgaaatctgacatggtatgccaacatggaaatctttgttctagaaacaagaggcagggtgcgccatgcagagccgcacaggaaagcaccgggttggtcaggaggcagagggaaggaggggtaaacatgagcaagagcctttattgtggtttccatgggaaggaatgggtgaggcaaggtaagcagccttaggattggttggtttgaataactgcagtaggtgctggggtttatataagggctttccctagctgtctggtgtctggccttgggatgatcagggcagttggatactggccctgagtaagagagcctaataaaggaggtgtttgtgggtgtgggctctggattgggtggcatgcatttgcaagggacctcctgggtgagttcttcactatctccaggaaccagttaaccctggttggggcagtccctctgggaagagcaagtccccaagatctcaaagcatctgagtacagaaaagcaaaggctctgggcacagtggctcatacctgtaatcccagcactttgggaggccgaggcgggtggatcaccaggttaggagttcgagaacagcctggccaacatggtgaaaccccgtctctactaaaaatacagaaattagccaggcgtggtggcaggtgcctaaaatcccagctactcaggaggctgcagtaggttcaagaggagaatcgcttgagcccaggaggcagaggttgcagtgagcagagaccacactattgcactctagcctgggcgacagagcaggattccgtctcaaaaaaaaaaaaaaaaaaaaaaaaaaagagcaaatgcatgcttaatacaagggcctactatatatcaagcatatatacgaaatgggcagtgaaccaaatggacagtctgggtattggtggggctcatatcctgtgggaagacaggcgatgagcagacaagcaaatctgtattttgtaaatatattgtatttttttcaacaaatattttatggctgccctgtgtgccaggcctggatctaagcattgatatatgatgaacagaatagataaagtccctgttttcagcaatgcatgttctagtggggggagactgcaatcaatgaacaaaaaaaaaaaaaaaaagaaagaaaattgaagcccaggcatggtggctcacacctgtaatcccagcactgtgggaggccaaggtgggcagatcacttcaggtcaggagattgaaacaagcctggccaacatggtgaaaccccgtatttcctaaaaatacaaaaattagctgggcgtggtgatgggttcctgtaatcccagctactccggaggctgaggcaggagaatctctttaacccaggaggcagaggttgcagtgagctgagatcgcgccattgcactccagcctgggtgacaagaccaagtctctctctcaaaaaagaaagaaaagaaaagaaaaagaaaaatcagtgacaagaagtaaaacaggatcaagggattaaaaaaaaggactggaaagttattccagataaggtgatcagggaagtcttctctgaggaggtgatgtttgagcaagccatgagtgaggagaaggagccagccacacaaaagcctgggagaagagaattcatgcagaaagagaccagagtgaagggccctggagtgatgagaagcttggtgctgtggaaccgaggggaagccagctagtcttgaggcaggagaatagggtctggaggcagggaacataaggctgattcacactgactttctagaactaaatcaaaaggaaaaccccaactttccacgtccaagtaaccaaaggaccagaggctactccctttgcaatcccagcttttctgtgtgcagatgaaaaactgaaagtacctctgattgctcccttcccactaccagtcaggctggtaggtggccaagtcttcatttgcatgggagtataactttgtaacttcacttcagcctctgattgataactttccacagccaatcagacattggcgtagggtgtaacttttaacttcagcctctgattggccactttccacaaccaatcagactgatcacgggccactccttcatttacacagggcgtacaccaaataaccaatgggaaacctttagagggtatttaaaccccagaaacttctgtaaggagcctgttgagtttctttgcttgagctgttcttgccctgtagagtgtactttcgttttcaataaatctctgcttttgttgctttattctttccttgttttgtctgtatgttttgtccaagacgccgagaagctgggcaccctccaccgttaacagtccggctgcagcatagtgagtaacgcagtgggttaggacgagcgtgaggtcagagacaggcaggagtcaagaagtgctggaagcagagaagtgatttaatctgtttttaaagctctctctggctgctgtgcggagattggatgataggaaggacaaaagtagaattaggaagacaagctaggaggttatctccctggtaagagatgccgttgatcagcctggggcagtggctgcggagatgcacagatgtgtggcatcagtgaatcttagaccttttccgccattgaaattacatagggagttaaaacacgcacagacttctggaccttacctttgcagagccttgtgaaaggcaaataaatcttggggccccaaaatcactaagctaaagggaaaagtaagtcaagctgggaactgcttagggcaaacctgcctcccgttctattcaaagtcacccctctgctcactgagataaatgcatacctgattgcctcctttggagacgctaatcagaaactaaaaatacaaaaaatgcaaccatttgtttcttttttctttctttttttttttttttttttttgagacggagtctcactctgtcgcccaggctggagtacagcggtgcgatctcggctcactgcaaactccgcgtcccgggttgaagccattctcctgcctcagcctcccgagtaactgggactacaggcaccagccaccatacccggctaatttttttttttttttttttttgtatttttagtagagacggggtttcaccgtgttagccagggtagtctcgatctcctgacctcgtgatccgcccacctcggcctcccaaagtgctgggattacaggcgtgagccaccgcgcctggcctcaaccatttgtttcttatctacctatcaccaggaagccccttcccagcttcgagttgtccagcctttccagaccgaaccaatattcatctcacatatgttgattgatgcctcatgtctccccaaaatgtataaaaccaaactgcgctccgaccaccttgggcacaggttgtcaggacctcctgagcttgtgccacaggcacatcctcaatcttggtgaaataaactttctaaattaactgagacctgtctcagatattcggggtttacagactcaatgcctaaggaatctatactttttacaagccccctgggatgtgctgcttcgtctccgggtacccacttgtctactggtcgtaaaggggtaagtgtggccgggcttggtggctcatgcctgtaatcccagcactttgggaggccaaggtgggcggatcacttgagtttaggagttcgagatcaggttgggcaacacggtgaaaccctgtcttcacaagacaaatacaaaaaattagccgagcctggtggcatgtgcctgtagtccaagctattcaagaggctgaggtggtaggattacctgagcccaggaggacgaggctgcagtaagccataatcgtgtcattgtactccagcctgggtgacaaagactctgtctcgaaaaaaataaaaataaaaaaaggtgcgtgtgatgatgcagaaagaggagcactggggatgggagagggggagtccctgtcgttttggattctagtcccagttacgggtctgtttggggggctcggtggccccaagtgatcatcagggatagcaatgcctatctcgaagatgggctgaaagtgaggaatacataacatagtatttgtaaagcactcagcaaaggaccagccgaagcactcgggctatttctggtaaagggtgcaggctctggggtaaatcgcgtgcagttggaacacacatcggctttgcagccatctgctaatgtgaattccattccttttggggcctcgatttcctcctccataaactggtatccacaatgccaaccttgtgaacgctgtgagaatgcgcggggtaaaggcgacgtctctccctcccgggaagaacttggatggtgtcaggcctacactctcgctccgcctagggccgctcgctgggcctggctccccggctgccgggctacgcgagctcagaggacaccatcgccctcttatggccgcggcaggactggaccgaggggctgggctctagtgccttcctccaggcacggcagagggcgagggtctggcagcccgcttacccagggcctcggggcactagcattcatgtcatcgactgcctggcagggctggctttcttaagtgtggtcgtgagacttgcttaagtggaagaaatgctgtcgctttggagatttataaaacaattggctcgatggatctttcttcaggaggcggacttggtttaccggctttactgaccacagctgatgccaatgatttcatttaatcgtctttagagtccctgtgcatggggagttaccatccccaattagtttcttgtgaatgcagggcaaggagagggagagggtagtgggggacggggagaaggggcgaggggtaccctcctattaaaacggagccgcagaaaaacccacagagacatccgtctgttccccgctgagtccttagaacagcgcctggcacacagagagcgctcaactcgctgtgtaactaaatgcaagccaagatcttcgcattgtgtgtgctcttcccttccctaccaaatatacctggcttgcaaggtttgacctgttttcttagacgatttttaacttgtttccaaaagaaatattggagtaaattagcttgttcaaaggagtccttatgaaaggacagaaccaagtgagaagtatctggagcccggtttggggttatagatgatgatgttgagccagcacccacggggcggccgcaatgtagaatcctggcgctactgggaaccgtgtggaaaggggctcttctttctgttcaaatagtgttttctgtagatcccatctctccatcctcctgagctctctcttacaaaatatcggatttcagcagcttagaattggacagaaactcagaggtccgtttctcaattatctctaaccctggtaaacaataaatgggatgatgagtacaagacagttttggtaaaaagtcacacgccacacaacgtgagattttattattccacgggtgcttccttgccaatagtagacatggcagctcggctcccttcccttcgggttcgccttattgttgccaattgtaaacatggcctctaggccgtgagttctcattggcagctgctctgagtccccgcccttccccgcccctccgaacgcggcctggagttgtggagtcggatatcgcagctcccgactgagctgcgcctgcgcaactcattggcgccaagatggcgatggagatgaggcttccagtggctcgcaagcctcttagcgagagactgggccgcgacactaagaaacatctagtggtgccgggggatacaatcactacggacacaggattcatgcggtacgtggggacttgggggagtcgaggcttcagagagcggcttcagggctctctgcacgtggtccaggcctcgtatccctgtgtgtgtaactccccgcgggacccagggcacttcgtctgagcatcctacacacctcgcttccgagcctcgtgcttcttgctccctgcatcttgtgtgtccccgtctgcatttgtctcagctccctgaaaccctccactcctgacctccggtggctgtgacttttgggtcttctgcctgaagtccaaatctttgatccttccttgtgggagacctggaaagctggggagggttaggtgcaggctcttttccagttttcagctctctgaggggacggtgggcgttcttggctgcctcctcttcagtttagaatccgtaattgttcgatcttagggcaaacagttacattgtgctgcatgcacccatttatacacattttgaatctaaggggtgtagtgcagtgtattgtggttaagagggaaggctcttgagtcagacagttggggttccggtcctgctaccatcacatcttattagcggcattgcctctccacggtcagtttcctcatctgtaagatagtgataataacagtatgatacggtaatgaggattaaatgagacaattatgtaagaaaagaagtaaaaccagccattatatcatcatagataacactagtgtttcaacctttattattattatttttttacttgtatatgtacaaggggcacagcattcatagcattgccctttaacctgttagtttaaggttagtggataccaggaaatttttttttcttttttgagacggagtctgtcttagatcagtcgtgcgatctcggctcactgcaacctctgcctcctgggttcaagtgattctcctgcctcagcctcctgagtagctgggattacaggtgcacgccaccatgcccagctaatttttggttttttttttttttagtagagacagggtttcactgtgttggccaggctggtctcgatcccctgacctcaagtgtgatctgcccgcctcggcctcccaaagtgctgggattacaggcatgagccaccatgcctggcccctaggaaatcttaagattcattctttcattaatgctttcaacatatattttgtgcagttgggttattatggcagagtgaaaaatctctgtcctggtggagttctaacagggagagatagataataagcgcaatgaataagttattcagaatgttaggcaataatgcaatagggaaaaaagtggagcagggtcaatggtatgtggggggaatggtggcaacagggtgggctgtgttttcaatggcacagtcaaggtaggcctgctgcagaaagtgacacctgagcagacctgagtgagaggagtgatgtccaagtagctgtctggagaaggagcactgaaggcagagggagcagccagcacagaagccacgctttgcagggggagcctgttagctttgaggaacacgttgttcttgaagggagagaagtcatttcgagttaccctcgtatcctttctttgtatcttcgccttgcatcaggggccatggaacgtatatgggagaagagaagctcattgcatctgttgctggctctgtggagagagtaaacaagttgatctgtgtgaaagctttgaaaaccaggtgagaacaaaaggtgtgtattccctttcttgcagcatcaggttgtacaaccaggcttttcctgccccctccttatcccccaccccacccctgcctgccctgtcatgctgtaagtctgaggttttgaccatgactgtaggtggggtggtgcagatcagtgcaggcttcagaggtttccccatgttatgtcaccactccaagccttggttacctcctctgcaaagtgagtataatagcatggcctacttcataggattttctctttttttttttttttttttttccgagatggagtcttactctgttgccgaggctggagtgcagtggcgtgatctcggctcactacaaccttcgcctcccgggttcaaacaattctccttcttcagcctcccgagtagctgggattacaggcgccctccaccacgcctggctaatttttttcgatttttagtagagacagggtttcaccatgttggccaggctggtctcgaactgctgacctctgatgatttccccccacttggcctcccaaagtgctgggattacaggcgtgagccactgtgcctggcctaggattttctttagaattcagtgagatggtgcctgtaaagtatttagcacagagcctgatacctagaagcattcaatgaaggttagccccagaaagcaagccagtggggttggaacagagtgagtgagggggagagaaggggcagatgtaagcagagagctgaggtgggcgggcgtgggcctgccttgtagccagagtaagcattttggcttctactttgtgtaatctgggaagcactggaaggggtggagcagaggagggacttgatctggacttaagctcactctggctgctgatgggagattgaagggggatagggcaagcttagggaggtggattagggaccatactcatgatctgaagtgatggtggcttcaactaaggtgggagcagtggaaggtggaggagtgattggaatctacacagattttattttccgagtgtttttttaaaatcatgaaaagctgttgggttttgtattctttgggctttactgtgcataggaccccgtcaactgtgaatagaaataagtttacttcttcctttccaatttggatgccttttatttcctgcatatgttttaagggtagagccaacaggttttgctactggacttgtcctggagcgtgagagagagagaggaatcaaggaactctccgaggtttttggcctgagcaactgaggggatggagtcaccgttgactgagatggggacaactcatcccctatctcggtttgctatggaggactggagggggctgcgggaaagcttagttttgtgcttgatacatttgaaaatgcctgttagtcatctagatggcagagttgggtagctagcagttgagtaggatttggaattcaggagagtggcacagtcacagcacagagtggtgttttaaaggtattagattgagtggccgaaaagtgaagaggtctaaggacttagcctcagcactgagtacgtctcattagaatcgcgggtaaggaactagcaaaggggcttgagaggagcaggcagtgagtaagtggaggagacgtgagcagacttgtgtggttggagtcctggctcagatttcctttctcttcctttggctggtgcagaactcatccatgtgccacaggaaaatagtccgtgtttttcattgtcgtgtaatcgaacaaaatagggtttttgggctaaatgaactacttggaatggtgatatgtctaaggatagttaatggagactttatacgtggaggaatgtttgaagttagcagtttctgaaagtaagtccagacaatatagttacatgaatttgctgaatgtggcgcctgttccaggctttcaccctgttgaaccgacatctcaaatggtgtgtggtcttgtcagaaagtctgctcacagatggatgaaccccttgtgttttgtctttcagatacattggtgaagtaggagacatcgtagtgggacgaatcacagaggtaacgtcgatatcagattggtgtttacaaagtcgaggcaggctggcgatttcattcatgggacagtcattccacttgtagttacatgaaaaaggcattcattgcatttggccgttgtgtggcttctgatgtaaatatgtggcttgttcgatttcagattactggttcatgtttttttttttttgagatggagtctcgctctgtcgcccaggctggagtgcagtggcatgatcttggctcactgcaacctccacctcccaggttcaagcgattctcctgcctcagcctcccaagtagctgggattacaggcacccgccaccacgcccagctaatttttgtatttttagtagagatggggtttcattatattggtcaggctggtctcaaactcctgacctcaagtgatccaccagcttcggcctcccaaagtgctgggattacaggcgtgagccaccacatctggccttactggttatttatgatatgacacatgaacatggagcatgtgtccaggtgtggaacttggcttataggttcaacagaagaggtggaaggtggagaccaactccaggctggattcggtcttgctgctctcgtccatgaaccttcctggaggagagctggtaagggctacagctggggccatggactagggcccagtgggctggggggagccgtgggaccctttgttccaccagaggactttgatttacactgaggttgcccctttgactcctgtttgtctgctgtgaagtttgctgcctagatgtgtatgtagacttttcaccctgtccaggtctcccgaaagagggagcagttggcatatggtaggatcagaaacatccatggggtgggatcccaacagagagttggggagagaagcccttagatgctggttgttaacagttttccttttggatataacagccttgcatagtgaagatgttccttgaaaagttgtctttacattaggtttttgtgaattgaaaggcatttcattcaaccatgtgtggaatgtggttgctggcattccagacaaccacagtaactaagccacagccttttgtaaaatgccatggttcaccttgatcttcagtccagcgtgtatttacagagaggcttactgtgccaagctctgtgccgagtgccaagcacgattgagttccccagcaggggatataagataactgacctagtccctggcagtagaagaataaataagctgtggttatacaaaaggaaatttcagtgagagaagcttgtaggaaagacaggcattggagttgatcctggaaggatggagagactttgaatgactagttcagggaatctgagataaagggaaatgtatgagcagagatatatccaagcaggagttagtctggtcctgctggaccacagagggctgtcatggaagatgactatggaaatgttggctaggtgagattgggaggggtctgaatgttcctcagagaagggagggaaagaggaagaggagctgtggaaaagtcttttgagatggaaagtcgtgattatcactgattcccctcaagtggcttgggttacctactcttgctatagttctcagtgcttgaatattgtggttggcctcaaacatctcaaaaggaagtgaaagagaagtgatggagacctttctgaggatctggcttaagtaatgtcatttctttgtgtatttcagaggagaagatctgcagaagatgagcttgcaatgagaggtttcttacaggaaggggaccttatcagtgtatcctgcgctttgcactccagcctcttgatgcttttctgtgggactgggaaatgggccttccattgtatgtctctgacggaagaaccatgtcatccttgcagggatccgagtcttagaccaagtgtcgggctctgctgcatcctttctcagtctccttaattcaggctgactccccagctcttgttgggacctgctgctaagtcatttctttgggtcttgtaacttacggtggcctgtgctttagactaggcttttgttaatggtgttaacttttagcgcagggagtggagaaggtgttgttcacgtcaagatattaatgacaggccgagtgtggtgactcatgcctgtaatcccagcgctttggaaggccaaggagggaggactgcttgagcctaagagttcaagaccagcctgggcaacatagcaagacccccctctctacaaaaaaattaaaaaagaattagccgggcgtggtggcacatgcctgtagtcctagctactcaggaggctggggccagagggttgcttgagcccaggagctcaaggctacagtaagctatgatcacaccactgcattccagcttgggtgacagaacaagactctgtctctattttatgttattttttaaatttttctttttttttaatgacggagtcttgctctgttgcccagactggagtgcagtggcgcgatctcggctcactgcaacgtccgcctcttggattcaagcaattctgccttagcctcccaaatagctaggattaccggcgtgcgtcatgcctggctaatttttgtatttttagtagagacaggtttcaccatattggccaggctggtctcaaactcctgacctcaggtgatctgcccacctcggcctcccaaagtgctgggattacgggcatgagccaccatgcctggcctctgtctttattttatttatttatttatttatttatttatttatttatttatttttttgagacggagtttcactcttgttgcccaggctggagtgcaatggtgggatctcggctcactgcaacctctgcctcccgggttcaagcgattctcctgcctcagcctcctgagtagctgggattacaggcatgcgccactatgcccgactaattttgtacttttagtagagacggggtttctccatgttggtcaggctggtctagaactcctgacctcaggtgatcgacctgcctcagcctcccaaagtgctgggattacaggtgtgagccaccgcacctggccttctgtctgtatttttaaaaaaaagatattcatgacaaccaaggggagaggtaaggtcacagtgatgtgctctgggtcaaagattgttgagcctggaccattggagaggggaggaaaagatggaggtgtggggtcaaggggagaggctgcagaggacaggacagtgtgtggccaaggctgctgtttgttccttcatcaccctggccaggctgaggtccaggcagtgttctctgacggagctgtctctttgcacacgaggagcctgaaatatggaaaagtaagtcgggctcttgatgttcctgtttgctgactgagactacaaggctatttttgaatccccatagctctctggaattctggcctaaagaaccccagtagctaagcattaatagaggctggcatcccacaaactgatcgtgttccttaaacgtaacatcaggacggtcagggttcacagggtcatgggtcagtagccttgtaaagaacaagttttatcctttttctccaaggagactgactttcaccagaagagcccctccaactgtgggctgggaggtgcagctgtctctcttcctccagggggcgctgcagctcagcactggggctgaggctgtcctgggaacaaaggcaggctgggtctggttaaacagcccttagacaaacgtccaatcagtccagtggatgttattgctggcaaagcttgctctgtcatctgagcctctaaatggaatttcactgcttttcttgtacgaggttgcattattgaagctatttactattttaaggagagcatacttcctaaaacaaattaggatttactagtctcttagctttatctgggtgaacgtttttattttctgagtggaacaaaaacctcttcccttaatggagtggctgcagacagccacgttgatgtacatggagtaggcagaggactgctgcagtatgctgactttcacaaccctgggtcctgcggactcttccttggcaggacgtggacttgagctgtcctgccaggaccagacatggatttgcacccagctccacccatctccttacctacccagaggcacacatctcacaggcaagatgagtgtttggggttcaggtatgagctagggtcatggaacaacgcagtgctcctgggccagcaggaggctccagctcacttcctcattggcttcagcttctctaatgtctggcacatgagttctggcttagagtgcaaggaagactgcaaagggaaatgacagagaagagtattgaaggtcaccttctgctgggatgtatgaatagcctctgagtcccaaagcgttctctgcaaaaatgtgtactatgtgtatgcatgtaggcgacagcaattataaacaggaaggacaccaatttgaatatacttaggatgtatattctgtagtctccttttcattcatcccgccaatcttgcagtgacctagcttcgtgatatatttctttagctaggtcagggggttttggtccaggtttccccctccctggtgaaacggcagaagacccactttcatgatttgccatgtggtgcctcagtgattctcggtaacaacggcttcatctggatttacccaacacctgagcacaaagaagaggaagcagggggcttcattgcaaacctggaggtgagcaaacactgtggccattttcagtgggatggagggggctcagtctttgctgtgtttttgtggccagtgaagttggttgtttttagctatgttactggtgtaggctgagtcactttgactttccatcacggtatgttcatgaagcccatattatcttctcttctaaggagatgaattcagtgaatggtttggtgtttgttggtggaggtggcaaagttgcagggtaatagccgaagagccagtgaagaagccattctttttctgtttttttgtttgtttgtttgttttgttttgttttgttttgagacggagtcttgctctgtcgcccaggctggagtgcagtggtgccatctcggctcactgcaagctccacctcctgggttcaagtgattctcctgcctcagcctcctgagtagctgggattacaggtgtgccccaccatgctctgctaatttatctatttttagtagagatggggtttcaccatgttggtcaggctggtcttgaattcctgaccttgtgatccacccacctcggcctcccaaagtgctgggattacagacatgagacactgcaccctgccccattccttttaatctcccttggaattagctgtttggttgatttggagttccagggtgatactgtctgagtcataaatgatttatttgtgaatttctgtggctggtcacgtattttggtcctgtttgtatttcccttcccctctctgtgtctccttatagcctgtctctcttgctgatcgagaggtgatatcccggcttcggaactgcatcatctcgctggtaactcagaggatgatgctgtatgataccagcatcctgtactgctatgaagcatcccttccacatcaggtactctccccagggcctctcccttcttcactgatctgtgagctgctctgttgtttgttcagagacaatatgcacatctccccaatactttcccaacatccgtcagtatgaactggcctgaaacagccttaatgagtgtctggtagatctttccctaagaaacttgcaatattctcaatgcctagtgtcagtctaaggattttggggcaggaggtgtcaggtgggactagtttatgagagcaacctctggactacatcttacctctcccaaatttcagccagcttttggatgaatgtcagaataatatctttgttcttgtcgactatatcccagagcatcttgctgatttattaggctgcttctagcagatcatatcttgtaacgcttagtctctgagacatgaaaggaatacagaaagtttatgttaacggcttgatttatgtttggattggcttggtggtctgtttatggttggtttcttttctgaacaaatgccttttccctttttcagatcaaagacatcttaaagccagaaataatggaggagattgtgatggaaacacgccagaggcttttggaacaggagggataaggaggtgctccagaagcacgggactgtggaccttgcaggagtgaagactgtgatgtgtggtccccatatgtggctcagcaaagactcgagagatcatccctttgtctgcattgacggccctgtgacggcctccagcccacaggcctgctttctcctgtcctaacaccaagcctgggtggcagatgaacagtgcttccttgggttgccagctgagtcccggtattagggaatagtttcagctctttcaaagtgcacagtgttacagtcgaatgggctcccatcctggaataatatggagaatcctttgtcttccactcactgtcattcacaaggcacagtgccccatgaaattgccccaatagaaaacatggcatccctgacctccaaatggtctgttttggcctccattcctatatcctttaaatgactgagaatgcagctggtaaagttggaagaataaagttaaccaagcaggccaggcacggtggctcacgcctataatcccagcacttagggaggccaaggcgggcagatcacctgaggtcaatagttcgagaccagcctggccaacaaggtgaaaccccatctctactaaaaatacaaaaaattagccaggtgtggtggtgtgcacctgtagtcccagctatttgggaggctgaggtgggagaatcacttgaacctgggaggcggaggttgcagtgagctgaaatcgcgtaccacactccagcctgggtgacagagcgagactgtgtttcaaagaaaaaaaaaaacaagcagccttttgcttggttggaatctgattttctgttgcgtgttccttgtagccatagatgtgattatgtccacaccgggctgccttaatctgtcctgcttggagagtgacttgtaagatgctgaattattcatgataatacagtgaatgttctgggtccatgtactcagataaacatgaagaaaataagcaaagaaaaatggagactgggaaagcaaagctgttttcatcctataattgaagtagtgtggagcattaacttgtggatgattcagagttaaaagataaaaagacgccagagttctcgctgaagaatgtgagaattcctgtgcattgttttttctgatgactatctaaaaatggtgccctgatgtaggtttgggggaacattcttaaaaacaagggtgctatgtgcctgtaatccagcactttgggaagctgagtgggcagatcacctgaggtcaggagttcaagaccagcccggccaatacagtgaaacctcgtctttaccaaaaatacaaaaattagccgggtgtggtggcacaagcctgtatgtagtcagctactcaggaggctgaggcatgagaatcgcttgaattcgggaggcggagttgcagtgagctgagatcgcaccattgcacttcagcctaggtgacacagtgagactgtctcgaaagaaaaaaaggaaaagaaaaggcggccggacgtggtggctcatgcctgtaatcccagcactttgggaggctgaggtgggtggatcacaaggtcagatcgagaccatcctggctaacatggtgaaaccccgtctccactaaaaatacagaaaaaacaaaccatagcctggcatggtggctggcacctgtagtctctactacttgggaggctgaggcaggaaaatgacgtgaacccgggaggtggagcttgcagtgagctgagatcgtgccactgcattccagcctgggtgacagagtgagactgtctcaaaaaaaaaaaaaaaaagggacactatatgcaagcgctgtcttcacatatgtggcaaacttgtttgtttgtttttgagacagagtgtcgctgtgtcgctaggctggagtgcagtggctcgatctcggctcactgcaacctccacctcctgggttcaagcaattctgcctcagcctcccaagtagctgggactataggcatgcgccaacacgcccagctaatttttgtgtttttagtggagatcgtttcaccatgttgaccaggctggtctcgatctcttgaccttgtgatccacccgcctcggcctcccaaagtgtttggattacaggtatgaaccactgcacccagccatattttttgatatttatagacgtcttttttttttttgtttttttgagacggagtcttgctctgtcaccaggttggagtgcagtggcgcgatctcggctcactgcaacctccgcctcctgggtttaagcgattctcctgcctaagcctcccgagtagctgggattacaggcacgtgccaccacgcccaactaatttttgtatttttagtagaggtggcattctaccatgttggccaggatggttttgatttcctgaccttgtgatccccccgcctcagcctgccaaagtgctgggattacaggcgtgagccactgagcccagctatagatgtcttaacatcattgttttctgttcttttgttccgggtaataataaggagctgaggacagctgaggaagggcttggctgacaaaatgccttccgacagagccctaactactccacgtaaacctaggacagtctcaatggtagtaactttgaacactgcatttgataactttcaaatacaacttggctctttttcattaaatggtatgcttctctataacaacacaataaacaacttcttacctcactttctttttttgagacagggtctcactctgtcacccaggctggagtggggtggcatggatcacagatcactggagcctctacctcccaggctcaagtgaacctatcttagcctcccgagtagctgggtccacaggcatgtgacgtaccaccatgcctggcttttttttttttttttttttttgagacagggtcttgctctgtcacctaggctggactgcagtggcacaatcacgtctcaacctcctggtctcaaccagtttccaacttcagccttctgagtagctgggactacaggtgctgagccaccacatccagctaattgtttttgttttttgtttttcggcagagatgaagtctcactatgttgcccaggctggtcttgaactcctgacctcaagcaaccctcctgctcaagccatcttcccaccttagcctcccagagtgttgagattacaggcatgagccaccacacgctgcctattttttttatttttacgaatttttttgttgttgcccaggctcaagcgatccacccacctttgcctcccaaagtgctgggattatgtgtgtgagccacagctcctggcctctttttttgtttttcctatcccaagttgtattactagttttggggagtttgcagacaattgaatattctataggctgtgttgcagctttagatggatcgacctgtcatgtttttgaggttatccaggctgtatatctctggagagaagggaatggcaaagagtgggagtctgagtcaagtttggttttgtttttttaagagacaaggtctctgtaatccaggctgcagtacactggcatgaccatggctcactatagacttgggctcagccaatcttcctgcctcagcctcctgagtagctgggtttggttttccccagggccatatgtcagcttatttaccctcctcacttggtgtctcccagcctgccagcccatgctgttcatccagtatctgctgaatggtgattacctattaagtggaactaacacaaaattgcttatctaaaagcaattattggtgattatttccttgcagtggcccactagagggcgccattgttaagtgtaattccagtaggtgttttgtgttttttttttttaatggaataaactgaaatctttacatggtactgaatccctttagcaacttggggggttgctttaactgaatcacttttaatgaagatatatgaacttgaagggatttattcaatatatgacaatattactcaatattacttttttttttttttttttttgagacaaagtctcgccctatcccccaggctggagtacagtgacgggatgtcagctcactgcaacctccgcctcccgggttcacgtgatactcttgcctcagcttcctgcatagctgggactacaggcacccaccaccacgcccagctaatttttttgtttgtttgtttgtttgttttcctgagacggagtctcactgtcacccaggctggagtgcagtggcgtaatcttggctcactgcaacctccacctcccgggttcaagcgattctcctgcctcagcctcttgagtagctggaactacaggcacgtgccaccatgcccagctaattttgtgtatgtttagtagagacgaggtttcactgtgttaaccaggatggtctctatcttctgacctcgtgatctgcccgcctcagcctcccaaagtgctgggattacaggaatgagccactgcgcccagctgaatttttatatttttagtagagatggggtttcgccatgttggtcagcctgctcttgaactcttgaactcaggtgatctgcctgccttggcctcctgaagtgttgggattacaggtgtgagccaccacacccagccaagcaatatttatttccgattgtcaggcatttgccaggctttggattctagtttttaagcccttaacagtatcattcagggcctatgttctcaggacctcttgagactgtgcctcggtttttaaaaaaagtatcattctacagtattatacaggcatttttaaagtacagtgcattggccgggtgcggtggctcacacctgtaatcccagcactgtgggaggctgaggcgggcggatcacctgaggtcgggagtttgagatcagcctggctaacatggggaaaccccatctctactaaagatacaaaatgagctgggcgtggtggtgggtgcctgtaatccctcaggaggctgaggcaggtgaatcgcttgaacccgggaggtggaggttgcaatgatccgggatcgtgccactgcactccagccggggtgacagagtgagactctgtctccaaaaaaaaaaaaaaaaaaaaaatacagtgcatctctagaaaaaaatactagagtctgggcattgggcatggggctcacctaaaacaagaaaatggcaaagtggaaaactagggataaggctttagatcaggtgcagctgacctctgctgtgactcccaggaagcatagtcccaatctttgtggaaaaccaaatgagatctagtttgatcctcatgaaccctgtctctacaaaacaacaacaacaaaaaaacgtaggtgtggtggcatgtccctgtagtcccagctacttgggaggctgaggccagaggatcaccagaacccagaaagtcgaggctgcagtgagctgagattgtgccagtgcactccagcctggccaacagagtaaggccctgtcttcaaacaaacaaatcaaattaaacaaaaaacccaaaacccttgtaaagtaagctatgacctccatttacgggtgaagaaatgaactcagaattaaagggacttgatgaagcccctttgaattgtgaatcaatgtagatttaagctctagggaggtgtcataatgcagtcctttagaggatggactggactgactgaaagtttatggacccagaaatttaattccagcattgaggctgatcttttgtttggattgttattttgcttattgcccatccttccatgtaggttccatgaggacaagggtgggtttcttcccccaccactgtgtctcagcacctaaagcagtgcttcacatacagatgttcaataaatgcttcttaagtgaattgttatttattttttgagacatggtctctgtctcccagactggagggcagtggcgcaatctcagctcactgcatcctctgcctcccagactcaagcaattctcctgcctcagcctcccaagtagctgggattacaggcatatgccaccacgcccggctaatttctgtatttttagtagtgaggggtttcaccatgttggccaggctggtctcaaaactcgtgacctcaagtgatccacctgcctcggcctcccaaagtcctgggattacaagtgtgagccaccgcacccggccatgaattgttagtttaaaaaaatgtgtattaggggttctgatttgactgctcaattttaagctaaactagagaataaagcatgtgcgcggtggctcacacctgtaatgccagcactttgggaggctgaggtgggtggatcacgaagtcaggagatcgagaccatcctggctaacacggtgaaaccctgtctctactaaacatgcaaaaaaaattagccaggtatggtggcgggctcctgtagtcccagctactccagaggctgaggcaggagaatggcgtgaacccgggaggcggagcttgcagtgagctgagattgcaccactgcactccagcctgggcgactgagcgagactccgtctcaaaaaaaaaaaaaagaatctggagaaaatgactaaagtatgaatgggaataaaaagaaagcacaatctccagaaggaataattaggatataatcaggataagataatgggtaaataggccaagtacaatggctcatgcctgtaataccaacactttgggaggccaagagggcggatcacctgaggtcgggagtttgagaccagcctggccaacatggtgaaaccccatctctacaaaaatacagaaattagccaggtgtgtggcatgtgcctgtaatcccagctacttgggaggcaggagaatcgcttcagcctgggtggtggaggttgcaatgagcagagatcgtgtcactgcactccagcctgggcaacagagcaagactgcctcaaaataaataagtaaataataaataatgggtaaataaagcagaacaagggcattcacagttgaagaatgacactacagatcagaactaagattgtcagccagataattttgtgagagaacaaagctaaaccaaatcacatctgaatttataaattccagttctaaatctacgcacaatttttcatgttttccattccgtaccttccaagtaactaattcctcttgaaaccagtatcaaaaataagtgtcatctttcaatgcgacagaaatatttctaaaatacttaatataatagctgaatgtacaacactcatcgtgcagctgttcctccgatatcagtagcaacttgtgaaaaatcagtggtctcagatcaacaggtttttgatactgaatggtacagtgggaaccatgggttttggagcaaggtcagtctgggatgaaattgtgactctgtcacacattggccaagtgaccttgggtaggtaagtcacatctctgtttccccatctgtattatggggaatagtattacatgcctcactgggctatagtgaggattacatgagataatgcagtttatggaaagtgtaaacagtgctcggtgtaaagtaggagctgtgataagtggatccctccttagaaatgggatctcgggccaggagcagtggctcacgcctgtaatcccaccactttgggaggccaaggtgggtggatcgcttgaggtcaggagttcgagaccagcctggccaacatggtgaaaccctgtctctactaaaaatacaaaaattaggcacgtgtgatggtgtatgcctgtaatcccagctactcgggaggctgaggcaggagaatcgcttgaatccgggaggtgaaggttgcagtgagctgaaatcctgttactgcatcgcagcctgggcgacaagagcaaaactccatctgaaaaaaaaaaaaaggaaagaaagaaggaaagagaaggaaagaaagaaggaaagagaaaggaaggaaagaaagaaagaggaaaaaaggaaaggaaaaggaaaaagaaaagaaagaaaaggaaggaaagggagaaatgggatgcctgtcaggtgcagcgctctggggaggcgtggagagcctataatagggaccaaggtgctttttagtcgcagaacatggattatttgttaggtgtggctttggcacatctaggtcattggttctgccgacttgctaaacccaaccatctgggcattttctcggctaatatagaggatgttttcatgtgaacacgtgtccacctgtgaaatgtttataatgttaaaggttcgttctggggcaaacatctgatagcgcctggcaaacccaacaaatgccttttctgtaatgagtaagcctcctaatgcccaaagaaacagttgaattcgttagcaacatgtcggatgttttccctatgtctgtatatttcttcgctagtttttttttttttttctttttgagacggagtttcgctcttgttgcccaggctagagtgcaatggtgccatctcgcctcaccgcaacctctacctcccgggttcaagcgagtctcctgcctcaacgtcctgagtagctgggattacaggcatgtgccaccacgcttggctaattttgtatttttagtagagacggggtttctccatgttggtcaggctggtctcgaactcccgacctcaggtgatccgcccgtctcggcctcccaaagtgctgggattaccggcgtgagccaccgcgcccggcccgctagttctaatatttatgctttttggagggtgaagggcttgaaaggcatcaaaaaccttggtttctaggagcgagccaaattttctcccttagagactgaaggaggttatccgactccgcttccaggaaaatccaatccgcaatttttccctcgctttggctcttccaggtctcactactcgcgccggggagacgcggtccggcctacgctaggccggcaagaatctaccaggtcccaggagggcggggccgagccccagaagtcggggcccgggccaggagtcttggtgcaggcggactcgggcgcgtgccatgggaccacaactcccggcacgcaccgcggactgcgccgaacacggttggctgggagatccaaccctactgctcccaccggccaatgggacggaggaaagaggcctgacccggattctcggaggccaatggcaatacagaggaggcgggtgcttccttaccactcaccttgcgctcagagaagccacatttaaaaggtcgtgccgggccgggctttcgcaggcagtgggaccagagccgggaggggcggcggtgtcccgggaaagcggctcttggggcatccgggtcccctcgaggcgggctccggacgtcgccgtgggcggggccgagggcggggcctggcctcgttgtggagcggctcgtaatccatcatggcggccgcggggtttggtgtctgtgcctgagcagcgctggagccggagccggttcccgggtcctgcggctgaggagcccctccgctgtccacggcccctaccggcggggggcggctgggtccctcggcggagctcgggagatgtgactgcctgagggcggtggtggtgtcagcgtccggggccgggggagggggtgtctcgggcagagacccccgggcttggggcagctgaggcggccgggcctcctctacacggggcccgccttccgctgtctgggccgcgagagtccttcgtcccttacagccccgccccggctttgggacactgcgggtggtctgtttcccccagcttgggacaccccgttttctgaggcgtggaagagcgtcgccccggagtaagctgcccgtgccgcgccccgacagcttccctcagccccaagccgccccttattccggatcccggccccaactttggccacggagcctcccattcaaatccctcccttgctgtcaaggggtctccccttcccccaaggtggctcccgcgagcctctaatgccctgacttcttccaatgtcacctacggcccccttagtctcagctcagccaaaaactttaatgcaaaggaaaagtctggattggttccacaggccttttaaaaagcggacttaaaagttgctggcaatgcattccttttcgtcagagtcgagggcaaactcgctgaaatctgggtgacccgtgtccttttccggagagcaaagcagagaagcgagagcggccactagttcggcaggaaatttgttggaagatgaagaagctaagatagggggttggtgacttccacaggaaaagttctggaggagtagccaaagaccatcagcgtttcctttatgtgtgagaattgaaatgactagcattattgacccttttcagcatcccctgtgaatatttctgtttaggtttttcttcttgaaaagaaattgttattcagcccgtttaaaacaaatcaagaaacttttgggtaacattgcaattacatgaaattgataaccgcgaaaataattggaactcctgcttgcaagtgtcaacctaaaaaaagtgcttccttttgttatggaagatgtctttctgtgattgacttcaattgctgacttgtggagatgcagcgaatgtgaaatcccacgtatatgccatttccctctacgctcgctgaccgttctggaagatcttgaaccctcttctggaaaggggtacctattattactttatggggcagcagcctggaaaagtacttggggaccaaagaaggccaagcttgcctgccctgcattttatcaaaggagcagggaagaaggaatcatcgaggcatgggggtccacactgcaatgtttttgtggaacatggtgagtgcttttcaaaatttctgctcatggttttcctcatgcattcatcttaggccttcaaggaactttgaacaacagtacttgcgacagttccttccaattccacttaataaatttgttactgtagttatctcttagtggaactttctttgtataagaaaaagttacttcgtgacttcggctttattcaaaatctatttgagttgcttatttcttgcctgattcctctgctaattcactgttgaccttggacaagccactttactgttccagggctttagtttcctgaggggctggacttcagtggtttcttagggtccctggttctatgattctgctctaaccgaagtcgtgggctcttctgacaagcatggattctttactgctttgtctacagagagcttttatcatattctcaaagtggtttgtgttcctgagaaagttaagaatcatagatactggttgacgctaatatccttgaccttttccttcgtaagtaggacttgaaaatactcactttggagccatgtgggaaaaatcaagtggggaagcagcattccttgtgaattttagatagacagcttctgtcttaccttccataaggagtaatctcttcctcgttgatgaagctttcatcctgtcttctccctgtttagaatgatatttgggccaataaaggttatctgtgacatttttatgaacatatttggcatttgaatgctgcccgtacattttatgttgttcatgtccagtaattctgtgcgaagttaaagctaagggtcggcttacactgatgtctataaccagttaattagggttactgtttgtactgttgcagcctgacattttttggattgtgtcctttatattaaaaaatcagttgagcccacctatcctataagcaaacgtatgaagtgtgccagtggcttatactttgaaattcattcagaaataccccaacattgggtgactgcagtcaacaaaggcttctgttggatgaacttgcatttgacagctgaagttttactttcttacgggaaaatattcacttcatctaaataaatccgggtgcttggattttactttgccttgaaacattagttctattttagctttgtttttaggcaggcaaatatggtaatgtgttgttatgatggttcccaaattcaggatttaaaaagtgaattatttacattttaactagtgatgatcatgcaccttacatagtgaaaattggaacagactttttggagagctttggcggaacttatcagaatttgaaatgtacgtgccaatgacccagtaatcccattctgggaagctagtagagaaagcagtgtagttccctgtgtgtccctgatatctcttcaggggttgagaggctaaaactattttcttgttaatagagtaccaaggtcttgtctcttttgctgtgttgacgtttgcagtaatggtacaaaagtaaagcaggtgtcttagcatgattcagggttgtggcacctaactatacttgtagtcattgcattcttcatgacgtgcactcacagttaaacaaactaaatatatatatacacacacacacacacacatatatatccacttttcactgaaaaatgtcctttttttttttttttttttttttgagtcagagtctctgtgtgtcacccaggctggagtgcaggagtgcagtgtggcgatctcggctcactgtaacttctgcctcctgggttcaagcgattctcctgcctcagcctcccaagtaggtgggactacaggcacgcgtcactgacgcccggctaatttttgtattttttagtagagacggggtttcgccatgttggccaggctggtcctgaactcttgacctcaggtgatccacccaccttggcctcccaaagtgctgggattacaggagtgagccactgcgcctggctagttttcactggacaataccttgatgaagcagcaaaaattattaattttattacattttgacccttgtgtatgtcttcttaatattctgtgggttaaaaaggggggtatgcatcaagcacttctgtacagtaaagtataatgattatctccaggaaaagcactttcgtggttgggttgcaaactgaactagccacttttttcatggactgccatttttacttgaaactatgacaaactatggttattcagactaaaaagtgtatgaaggaatctttcaaagaaaacaacaggtagcatttgttgccaatgatgaaattttagctttccagtgaaaattaggattttggagaattttttttttttcctcttcggggtagagtttcgctcttgtcgcccgggctggagtgctgtggtgcaatctcggctcactgcaacctctgcctcccgggttcaagcgattctcctgcctcagcctcccaagtagctgggattacaggtgtgcaccaccatgcctggctaatggagaatttttatctgcctctgtgatatagagattggtggtaatatttacagatgccatattttaatatcttataatgaaatgtattatttggaagatctacataaatcagtaaatcaatattttcttttttgtttgtttttgcgacagagtcttgctgtgttgtctaggctggagtgtagtggcatgatctcggctcactacaacctccacctcccaggtttaagcaattctcgtgcctcagcctcctgagtagctgggattacaggcatgcaccaccacaagtgaataatttttgtatttttagtagagatggagtttcaccatgttagccaggctggtcttgaactcctgacttcaaatgatctggccacctcagcctcccaaaatgctgggattacaggtgtgagccaccgtgcccagccaaaccattattttctaaatgatcaatgcatgatataaaatcatgcacaggttaaagatccattcaaagtgcaaaatggaggccaggtgctgtggctcgtgcttgtaatcccagcactttgggaggccgaggcaggtggatcacctgaggtcaggagttcgaacccagctgtgcaatctagtgagatcttacctctacagaaatttaaaaaattagccaagctcccactggagccaaagagtcgaggctgcggtgagccatgaacacagcactgcattccaatttgggcaatagagggagaccgtgtctctcgggggtaaaaaaaaaaaaaaatacagttcattggtagagtttcttaaaggcagccagcctttaagaaattcctggctaggccgggcacagtggctcacgcctgtaatcccagcactttgggaggccgaagtgggcagatcacctgaggtcgggagttcaggaccagcctgactaacatggagaaaccctgtctctaccaaaagtaaaaaattagccgggcgtggtggcacatgcctctaatcccagctactcaggaggctgaggcaggagaattgcttgaaccccggagcggaggttgcattgagacgagatcacaccattgcactccagcctgggcaacaagagcgaaactcttgtctcaaaaaaaaaaaaagaaattcctggctgggtgtggtggctcacgcctgtaatcccagcactttgggaggatgaggcaggcggatcacttgaggtcagtagttcgaaactggcctggccaacgtgatgaaaccccgtctgtactaaaaatacaaaaattagatgggcgtggtggcatgcacctgtaatctcagctactcaggaggctgaggcaggagaatatcttgagccccgggggaagaggttgcagtgacctgagatcgcaccactgcacttcagcctgggtaacagaatgagactctgtctcaaaaaaaaaaaaaaaaaaaagaaactaccatttaccatgttttgatgtagcatcaaagaacaatatctacggttatctagaaagtctgttttggggggagaaaacagttattttccagtaataaaaatatttgtttttaaatgaataattatgtttttaaatttcagtattcatttctaatgtggtaactattgatgagataacctacacaaactaagcctcttaggggccttcagttatttttcaagagtgtgacaagggcctgagattaaaaagtttgaggccaggcactgtggcttatgcctgtaatttcacactttgggaggccaaaggcgggtggattgcttgagcccaggagttcaagatcatcctgggcaacataagaagaccctgtctctacaacaagaacaaaagaaattagccagacgtgttatcacacctgtgttcccagctacttgagtggctgaggtgggagggtcacttgagctcgggaggccaatgctgcagtgagccatgatcacgccactgcactgcagcctgggtaacagagcaagaccccatctcaaaacaaagtttgagaactgttgctatggaaagtctatcaagaaggcacatagggatgtttcttgctgaagtactaacactgaatgatgtctgtgttgtggtgagtagaaaaaaagcaatttgaaaatcattatttatggtatggccccatttttgtaaaacaaaaatatctgtttatttgtgtatgtccaggaaaaaaaagtatggaaggattttacaccgaaatttttatctctagggacttggagctttaggtggaatcggagaaaactttctctttttggtttgtgtgatgttccaagtgtctttttacaacaaacttgggttatcttataatacgaaaaattcgaagatttaaaaactgaggccaggcacggtggctcatgcctataatcccagcactttgggaggttgacacatgtggatcacctgaggtcaggagtttgagaccagcttgaccaagaaggtaaaaccctgtctctactaaaaatacaaaaattagctgggcgtggttgcaggtgcctgtagtcccagctactcgggaggctgagacaggagagttgcttagacccaggaggtcgaggttgcaacgagctgagattgcacgccactgcactcccagcctgggtgacggagtgagactccatctcaaaataaataaataaataaaaataaaaactgaattgatgacagcccaacctgtcacttttttcagatccctttttatgaaagaatttgcttaagttgtgtctgaagacaaaccaattactttggaccctgggtattctttttctaagggaataccatgttattttgtgttacagattgtttgcgatctttcatagcctgatctttctagagttggttaatatccatgtaggttagattgaaaaacttgaattcagaaatgtacggtgttggagcagacatggatctggaagccaagaatagcgttggtgttgttgttgatggtgaatctgaaagagtgggcagatggcaactttttgccagaatcattcagggtcaaagggctagtcatatttacaagggaaaagaggaaaccatgttattaaatatttcatgcaccatatgttcctttcaaatttcagtggcttgactaagaaaattcacttttgggagagttggtacaacaattgaaagcacttagtagtcaactttttccttagtgtttccttcttccttcaacaaacatttattttattgagcacagactatgacaggtcgtgttgtagtcactgatgatatatttgtaaacaaaacaatccctgccctcctagaacttacattctagtgggaggagacacatcataaataagctaagtaaataaaatacagatatgttagtgatatgtgctgaggagaagaataacatagagaaggggacagggaatggggtaggaggtgtaattttagttagggtggctagagaggcctgactgagagggcggcatttgattaaagacccgaaggaggaagatgagcagcaggccctgttgaaatatgtgaaagaatttcaggccgagggaaccaggatgcagaaacctgaggcagagcttgctagtttcaaggagcagcctagaggccactgcaccagagcaaagagcaaaaggagagatgcaggaggtaaaatggagggtgggaagagaatggctgaaggagagggtggccttattggcccatttcaaggattttgactttgattcatatgatgtgggaaggccttggagaattttccgaggggactatactatctgatgtatgtttcagtatgaaatagaatctctctggctgctatgatctgaaggaggacaagggagcagggattccacgggggcattgattgcacagagccaggtaagagtgatgatgcttggaccaaagtggtggcactgggtggagggtcagaaccgacaagatttgctctcggattagatgtgggatatgggggtgtgagaggggccaagtgtgactctcaggttttcgaactgaataactggaagaatagagttgccttttattgaaatgaaggtcgaggctgcagtggtaagctgtgattgcgccactgcactccagcctgggcaacagagcaagaccctgtctcaaaaaaaaaaaaatatttaccatcaggtaaaaccacttatggttctcaaaactttatttaaaataatagacacttgataaatcaacactgtaggccgggcgctgtgactcacgcctgtcatcccagcactttaggaggccaaggcgggcggatc

SEQ ID NO: 3 - DNA, 5020 bp, Homo Sapiens
agtaaagtataattccatatgtagtagcataaaaaatgtctagatgtccagggtctcttctaaaattctatcactctggaagattaacaacagtcttactaaataactttacacatgaatgaaaaatggagaaaaattctattaagatgccaatcttattaaaatgaaatgggctattccctcctcccgccagaaaaaaaaaggctgggaaaataaaattcacaagttggtttttttcttttttctttttttacgagttggttttaaggttatttctaatattcatttttcctaatgacaccaatatatcgccatttacctgattttaaaactgcaactggttagttttaagtgaacacaagtgctatgtttttgtagctttaccatattcaatctgtaacttacttaataaaagaccttaaattcataatgcatgcacggtgatcaaaatatgagcactcctccaagctctgctactataacgtttgctcctttgggagcataatgatatggttttcttttttttttttttttgagacggagtctcgctcggtcgcccaggctggagtgcagtgatgcgatcttggctcatagcaacctccgcctcccgggttcaagcgattctcctgcctcagcctccggaggaactgggactacaggcgcccgccaccacgcccggctgattattcgtatttttggtagagatggggtttcaccatgttggccaggctagtctcgaactcctgacctcaagtgatccacctgcctcggtctccaaacataatgatctgttttaaggttgcaagtatttccattaggtatttatggggtgagtagggtggggcagatgtgtcccggaatggggcacagcggacaggaagtaacggtttataacaacgtgaacgcttctgacgtgtagcgggagcttcagaaagcgtggccgaatctgcagctcttaacaaatggctcgttcccaaaccttagcctcaactccttctgagcgataggggcatgctaccagcacggggggaaatgagatacaagaaacgcccgaaagggaaaaacaaggctgggctgtttccttcctttggggtcaagacagaggcacagaaggcccaggtctgggaggttggatcacctccggctggatgttgagccgggtgggagcccaaacagcagggggcccacaggaggccggcccaggcagcctcgcgtccacttaccaggccaggcccaggcacgtccccagcgacagcaggctcaggcacgttcgggggtctgcccagcccccgcctccgctgctccgggccacgggggtcttcccgccctcgctccgcttcccgggctccgcagcaggggctcccttgggccccgacttcttccggctcttcacctcagacatgtctggagaccctaggacgacaagcccagggcagcttcttcaccagggggagcaggacgtggccgccttggcgttcgtgggaaccctgggcggtgaccgcgccccctcacagacttggcaccgcccagagcccagccccttccctctccccggcatcctcgttgcttcactgagtctttcagctgccagctccatagttcccctaggagaggtgggcggcgacctcaacccacagcgccttccactgcgatattgctccaaatccgaggaaattcaaactcccgggcgcgcgcaggccgacgggacccgaggaggaggggcaggacgaaggggtcgcgcgcgccacgtcgggcgcgccgccgctgcccgagtccggcattggtgggaacgcggcgcgtccctgaggcttagccacgccccgtccgcggggtaggcgggcacttctacgcgcgcgggcatgagccgtggcaggagtgcgcggcggcagcggtggccgccccttggggcttggggtgtgtttatttgcataagcgggcgcgcgccgtccgggctgggtggatccggcgggatttgactgctccgctgtccagaggcggagaagaagaggtagcgagtggacgtgactgctctatcccgggcaaaagggatagaaccagaggtggggagtctgggcagtcggcgacccgcgaagacttgaggtgccgcagcggcatccggagtagcgccgggctccctccggggtgcagccgccgtcgggggaagggcgccacaggccgggaagacctcctccctttgtgtccagtagtggggtccaccggagggcggcccgtgggccgggcctcaccgcggcgctccgggactgtggggtcaggctgcgttgggtggacgcccacctcgccaaccttcggaggtccctgggggtcttcgtgcgccccggggctgcagagatccaggggaggcgcctgtgaggcccggacctgccccggggcgaagggtatgtggcgagacagagccctgcacccctaattcccggtggaaaactcctgttgccgtttccctccaccggcctggagtctcccagtcttgtcccggcagtgccgccctccccactaagacctaggcgcaaaggcttgggtaagttgacctcctcgcttttctccccgagccaggttctttggaggcttggtagctgatttcagggactgagaatttgaggacatggaatatttgataaccatcctgctcctgtaccaggaagagaaattctgtaatgaggaagtagtaaacttggggttttcgtggataaacgtgcgctgttttctgttttacgtccatgaagagttttggctttccattttgttgtgggttacaaaaggttttgagacttagttcagataagttgtgcagttttaaaacgtatttaagatttgcatattttagtttaacaggactaggtgaaattggaaattagtttcagaaaaccagagtgtcttatttgcttagctattggacatcacctaaaaaattcattcattcttgttttttcacatcgaatttcattactataaattaaggaacattttatgtttaagaggacaaaaacgttattaacattttaaaaaatgagagttttgattcgaatcaataactttttatcagttttgtgcccctgctgggcattttgtaagccttgacaagcataggcaaatgccctacgtccgtccctgtttttccaagtgctacatttggtgacttcaaaaacagtcattgaagcttgataattattgcccccttctgtgagctccaagttacttgtgctctgtttttgcacttcgggcattcacattcccactctctctctctttttcttctttgagtagactgtgaattatttcaggcaaatgactcaatcttttctgtagtcttggtgtctgacatatagggaggggcacaaatgtgtattgaatgaatgaattgataaacccgtttagactctttcactctatacattgtgtaaagttctgttaatgttttgaaaacttgcagatattgtgaactgggttttatgcccatggaaaaatttgcattatatttgaaataaagttgctagaaacgtcaagtattttactataaaggctgttattctttcctcatgtcctcctggtctgagaaatcacatcagaaagtgtttcctgttgctttgtgggaaatgtgtttagcaaggaggacctagagctgacatcctccttgaacgagaactaatactcaatagtaacaatgctctattcactcttatgtttgataaggaaaacaagaagtctcttaatattaggacttcaatgtaatcactattttatacaatcttaattaaaaaaggaagtattttattgtaagaaatgataatgtgtgctaaaaaaaattgacagtagaggccgggcatggtggggctcacaagtgtaatcccagcactttcggaggctgtggcgggtggatcacctgaggtcaggaattcaagaccagcctggtcaacatggtgaaaccccgtctgtactaaaaaaaaaaaaaaaataagacaaggtgggggagaaatcccaaattttgctactcagaagtaactcaaacatttcgatgaataaacttctaaacgtctatatatattcatatgataccaacacttgtttttttttttgagatggaatcgcactctgttgctcaggctggagtacagtagagtggtctcggctcactgcaagctctgccgccctggctcacgccattctcctgactcagcctcccgagcagctgggattacaggcacctgccactgcatctggctaattttgtatttttagtagagacggagtttcaccgtgttaaccaggatggtctcaatctcctgacctcgcgatctgctcaccttggcctcccaaagtgctgggattacaggcctgaaccgttgcgcccggcccccacgttatgtgttgtatgtgggatcatgtttctgttttttttttttttttttttcagcaacagtattatgaacatctttccatgtcaatacatggagatatgtgtcataattttgaatggctgcataatattccattttatatacataccctaatttttaaaatctatattcagaatgatggacatttaggttgcgttcatcactgaaacatcctccattaattcttttttctttttattttttactctagcctcccaatgtgctgggattataggcttgagctaccacacctgattggaaactcattaattctccttgtggatatttttacatatgtatttgaatgtctccttgaagtaaatccttagaaatgggatttctgggttagagagaaagcttattttaaacaattccatatcttactgctttccagaaaaattgcattcattttctagtttccccaattagtgcataagaatggccattttctcatacctttccaagcactgggttttgtccatttaaaaatttttgccaaggaaaaaaaatcagttttgttctttttacgtttcttgtttattagtgagattatgtatcttttcatatttttattggcctgacaaatattttggtgttttggctgtagc

SEQ ID NO: 4 - DNA, 2240 bp, Homo Sapiens
attgaggactcggaaatgaggtccaagggtagccaaggatggctgcagcttcatatgatcagttgttaaagcaagttgaggcactgaagatggagaactcaaatcttcgacaagagctagaagataattccaatcatcttacaaaactggaaactgaggcatctaatatgaaggaagtacttaaacaactacaaggaagtattgaagatgaagctatggcttcttctggacagattgatttattagagcgtcttaaagagcttaacttagatagcagtaatttccctggagtaaaactgcggtcaaaaatgtccctccgttcttatggaagccgggaaggatctgtatcaagccgttctggagagtgcagtcctgttcctatgggttcatttccaagaagagggtttgtaaatggaagcagagaaagtactggatatttagaagaacttgagaaagagaggtcattgcttcttgctgatcttgacaaagaagaaaaggaaaaagactggtattacgctcaacttcagaatctcactaaaagaatagatagtcttcctttaactgaaaatttttccttacaaacagatatgaccagaaggcaattggaatatgaagcaaggcaaatcagagttgcgatggaagaacaactaggtacctgccaggatatggaaaaacgagcacagcgaagaatagccagaattcagcaaatcgaaaaggacatacttcgtatacgacagcttttacagtcccaagcaacagaagcagagaggtcatctcagaacaagcatgaaaccggctcacatgatgctgagcggcagaatgaaggtcaaggagtgggagaaatcaacatggcaacttctggtaatggtcagggttcaactacacgaatggaccatgaaacagccagtgttttgagttctagtagcacacactctgcacctcgaaggctgacaagtcatctgggaaccaaggtggaaatggtgtattcattgttgtcaatgcttggtactcatgataaggatgatatgtcgcgaactttgctagctatgtctagctcccaagacagctgtatatccatgcgacagtctggatgtcttcctctcctcatccagcttttacatggcaatgacaaagactctgtattgttgggaaattcccggggcagtaaagaggctcgggccagggccagtgcagcactccacaacatcattcactcacagcctgatgacaagagaggcaggcgtgaaatccgagtccttcatcttttggaacagatacgcgcttactgtgaaacctgttgggagtggcaggaagctcatgaaccaggcatggaccaggacaaaaatccaatgccagctcctgttgaacatcagatctgtcctgctgtgtgtgttctaatgaaactttcatttgatgaagagcatagacatgcaatgaatgaactagggggactacaggccattgcagaattattgcaagtggactgtgaaatgtacgggcttactaatgaccactacagtattacactaagacgatatgctggaatggctttgacaaacttgacttttggagatgtagccaacaaggctacgctatgctctatgaaaggctgcatgagagcacttgtggcccaactaaaatctgaaagtgaagacttacagcaggttattgcaagtgttttgaggaatttgtcttggcgagcagatgtaaatagtaaaaagacgttgcgagaagttggaagtgtgaaagcattgatggaatgtgctttagaagttaaaaaggaatcaaccctcaaaagcgtattgagtgccttatggaatttgtcagcacattgcactgagaataaagctgatatatgtgctgtagatggtgcacttgcatttttggttggcactcttacttaccggagccagacaaacactttagccattattgaaagtggaggtgggatattacggaatgtgtccagcttgatagctacaaatgaggaccacaggcaaatcctaagagagaacaactgtctacaaactttattacaacacttaaaatctcatagtttgacaatagtcagtaatgcatgtggaactttgtggaatctctcagcaagaaatcctaaagaccaggaagcattatgggacatgggggcagttagcatgctcaagaacctcattcattcaaagcacaaaatgattgctatgggaagtgctgcagctttaaggaatctcatggcaaataggcct

SEQ ID NO: 5 - DNA, 8759 bp, Homo Sapiens
tagcctggaagagggcagccaggggagaagttagggctggagctatgagaaaggataagatgagatgatggcttcaacattgaggacagaaagaatattgagatgagaaagtagtccattataagcatctatgcaaaggaaatagcagatgtccacaaatcagcagaggcaacaactctgaaagtttattcataagcccctcttttcatctccaatccagttcaaatgtaattatttaaattgttcttcactctccttcctggatcatgaatgagctccttaaatgcagggtccacagtgtcctattcatcagtgaattccaagtgcctagcacagagcctggcaaatagtaaatgcttaacaaatattcgttcagtgcatgaattggagtgattctctactttgctcataagttgaaaaaaggtttattacatacctaaatatgctgaaatcacagggcatttggcaaccccccaaaaccaaaactcccagtttggaaacagaattttaattctgtgaaaataaaatccattcatttattcaaaaaatatttattaaacaatgaccatgtcccacaccaggctgagtcctaaggattcaatgatgaacaaaaaccaacatgattcctgctcttaggaaacatacagttcagtgaggaaaacagattgtgagaagtcctccaacaaatactgggtgctattaaaatatattaaaaggtgagtgggtgagggacttgagctagcctaggtggttcaggaagtcttcctggatgtgctgatatgcataggcattaactagataaatagagagaaggatgaaccaacattgcaggtagagggaacagaatatgcaaaggcaggaaggattatggagtcgttggaggacctgaataaaggccagtgtaagtggatctcagaaaacaggaggaaaggtgtatgagatgagatcagagaggcagatcatgtggggtatggttaatgttttggacttttctattaagagcaatggggagacagtgacaggacttaaacggggaaataatatgaccagattaaactttctaaaaaaccctctatgcaaatatatattgagagttaattattgacaaagattcaaaggcaacaaagtggagagagaatagtattttcaaaaaatggtgccaaaacaataggacatctatattaaaagttgggtatctgtctacaaaacttaattcaaaatggatcacagacctaaatgtaaaactgaaagctatacaacttctggaagaaaacacagatgggaatctgtgtgatcttgagtttgaaaatgatttattatatctgacaccataatccgtaagttaacataattcataagtgaacaaagtgatgaactggacttcatcagaatttaaaatgtttgtgcttcaaaagacactggtatgataatgaagacaaactacagataagatattgttgaatcatatttctgataaaggaattgtgctcagaatacataactctaaaacccccataataaattacaagtagcccaattaaaaaaaaaaaaagagaaaaaatttacagtcttcatcaaagaaagtatacaattgtaaaataagcacatgaaaaatgctctgcatctttattcatgggagaaataaaaattaaatgggaaagacacctctaattagaatactaaaattaaaaagactgaccataccaagtattggtgaagtggaaatgtaaaatgatacaatcacttaggaagatgatttggaagtttcttacaaaagtaggtgtatacctaccctgtgactcacccattccatggctaagtatttacctgagagaaatgaaagaatacatccatacaaagatgtttatacaaatatttatagcagttttatttgtagtagccccaaactgaaaagaacccaaatgtccatcaaaagtgaatggataaacaaagcgtggtacagcaatgcaatagaatactacttagcaataaagaagaatgagctagtgatatacataacagcttaaatgtacatcaaaggcattgtgctcagtgaaagatgcaagtaaaaaaaaaaaagagtacatgctgtatagttccattgacataaaactctggaaagtgaaaaacagtctatactgacagaaagcagatcattggttgcctgaggaggaggagtataggagaggtggagggaaaatgtacaaagtggcacaataaaaacttttggaatcatagatatattcactatcttgattgagtgatgatttcatgagtgcacgcgtgtgtcaaaaatgatcaatttatgcaactttaaatatgtgcagtttattgtatatatcaattatacctcagtacggctattaaaaagaaaccctctggctgcacaatgcagaactgattctaggaaagagtggagggaggatgaccatttacagtgctccaggtggaagagaacggtgccttctggaagtgaactaggttggcaacaacagagatgaaataaatgggcagatgtgtgagatacttaggaaataaaacccgatggtcaccattttccaaaggtcagctcatcctggctttccagagcaaagagctagggaagactttattaataaatccctcttgaagttgcagaggaagcttatagcagaaacttactctcaacctgactaatctgagagaacacctctggttccatttgattactaaaaaactgcaaagaacaggaggagaaagaagaagaaagctggtacaaacagtgaacttatataatattaatcaataattgtctcttgttcttaaaagcaatgggaagaaaatgagatttgagctggaagatcagagttcaaaatccaaataaagtatatggccctaatatgcttatagtagttaacctttcctgataatgatataattgttgacagcaccatctttaaaaataaaaataacatagtaatccttcagatttgtagaatgctttcctgtttacaagtttgttctatacacattatgtcttttaaatgacacactagccttctgagggtaacttatattggcaacagttttcagatgtggaaactgtgaagacaatgttggtgatgtggaagcaacataaactttggagtctttcagacccaggtttgaatgtcagactgctttttattcagagtaacttcagagcattatttctcaccttaattttttttcaggcctctttgtgtctatgtgtcctcttcactcctgtccattgttcattcagtgatttttgcaccttccttcactgttagtgtgtagacacatagttctcctggctctgagacctatgttaattccattctaccatcctgccagcccactcaattcctattgagcaatgctagttgaaagttgtggtgggattaaatgttgcaatgagtattcaaatgaggttgaagtatctacgcattctacttacatatggtgaggtatattcaaggaaggctgtagccattaaaatctcaggaaataatttttcacctcctcaggtgaaagggtcttcaggcctttgtgttctggaaggttcatttatagccatttcccaaatgacaatgcgattgatgagtctagagtctagctcaaatagcaatggactggaagactagtttaggttttactaatgtggaacatagaacaaattatgtccttgtttcagcctgttcatctgtgaaatagagcctatcatatccagtcttccttgcctttaggtttgagttaccttctttggtcaaggtaagtaaatgcctatgatgtttggctgtgcacaagataaagctacaacaaagctacaacccatcttttctctgtagaagactgcaaaaagcaaaagagacccaggcaaaaatctcggaatgacttttggaacagagagcctccccagaatcagaagtcaaaggaatttaaaacatagggaggcccagggtctctactgacataaaggaaagatgttttccttataggtttacgtttacattttctctctctttccattcccacttgcatctccacctttacacagggcttatgggacctcctccacaaaagagcagttgcagtaacccacatcatcctctacgcctggctgtccatcaagaggcgaaaagcagccctatataggttctatccttggatagttccagttgtaaagtttaaaatatgcgaaggcaacttggaaaagcaagcggctgcatacaaagcaaacgtttacagagctctggacaaaattgagcgcctatgtgtacatggcaagtgtttttagtgtttgtgtgtttacctgcttgtctgggtgattttgcctttgagagtctggatgagaaatgcatggttaaaggcaattccagacaggaagaaaggcagagaagagggtagaaatgacctctgattcttggggctgagggttcctagagcaaatggcacaatgccacgaggcccgatctatccctatgacggaatctaaggtttcagcaagtatctgctggcttggtcatggcttgctcctcagtttgtaggagactctcccactctcccatctgcgcgctcttatcagtcctgaaaagaacccctggcagccaggagcaggtattcctatcgtccttttcctccctccctcgcctccaccctgttggttttttagattgggctttggaaccaaatttggtgagtgctggcctccaggaaatctggagccctggcgcctaaaccttggtttaggaaagcaggagctattcaggaagcaggggtcctccagggctagagctagcctctcctgccctcgcccacgctgcgccagcacttgtttctccaaagccactaggcaggcgttagcgcgcggtgaggggaggggagaaaaggaaaggggaggggagggaaaaggaggtgggaaggcaaggaggccggcccggtgggggcgggacccgactcgcaaactgttgcatttgctctccacctcccagcgccccctccgagatcccggggagccagcttgctgggagagcgggacggtccggagcaagcccagaggcagaggaggcgacagagggaaaaagggccgagctagccgctccagtgctgtacaggagccgaagggacgcaccacgccagccccagcccggctccagcgacagccaacgcctcttgcagcgcggcggcttcgaagccgccgcccggagctgccctttcctcttcggtgaagtttttaaaagctgctaaagactcggaggaagcaaggaaagtgcctggtaggactgacggctgcctttgtcctcctcctctccaccccgcctccccccaccctgccttccccccctcccccgtcttctctcccgcagctgcctcagtcggctactctcagccaacccccctcaccacccttctccccacccgcccccccgcccccgtcggcccagcgctgccagcccgagtttgcagagaggtaactccctttggctgcgagcgggcgagctagctgcacattgcaaagaaggctcttaggagccaggcgactggggagcggcttcagcactgcagccacgacccgcctggttaggctgcacgcggagagaaccctctgttttcccccactctctctccacctcctcctgccttccccaccccgagtgcggagccagagatcaaaagatgaaaaggcagtcaggtcttcagtagccaaaaaacaaaacaaacaaaaacaaaaaagccgaaataaaagaaaaagataataactcagttcttatttgcacctacttcagtggacactgaatttggaaggtggaggattttgtttttttcttttaagatctgggcatcttttgaatctacccttcaagtattaagagacagactgtgagcctagcagggcagatcttgtccaccgtgtgtcttcttctgcacgagactttgaggctgtcagagcgctttttgcgtggttgctcccgcaagtttccttctctggagcttcccgcaggtgggcagctagctgcagcgactaccgcatcatcacagcctgttgaactcttctgagcaagagaaggggaggcggggtaagggaagtaggtggaagattcagccaagctcaaggatggaagtgcagttagggctgggaagggtctaccctcggccgccgtccaagacctaccgaggagctttccagaatctgttccagagcgtgcgcgaagtgatccagaacccgggccccaggcacccagaggccgcgagcgcagcacctcccggcgccagtttgctgctgctgcagcagcagcagcagcagcagcagcagcagcagcagcagcagcagcagcagcagcagcagcagcagcaagagactagccccaggcagcagcagcagcagcagggtgaggatggttctccccaagcccatcgtagaggccccacaggctacctggtcctggatgaggaacagcaaccttcacagccgcagtcggccctggagtgccaccccgagagaggttgcgtcccagagcctggagccgccgtggccgccagcaaggggctgccgcagcagctgccagcacctccggacgaggatgactcagctgccccatccacgttgtccctgctgggccccactttccccggcttaagcagctgctccgctgaccttaaagacatcctgagcgaggccagcaccatgcaactccttcagcaacagcagcaggaagcagtatccgaaggcagcagcagcgggagagcgagggaggcctcgggggctcccacttcctccaaggacaattacttagggggcacttcgaccatttctgacaacgccaaggagttgtgtaaggcagtgtcggtgtccatgggcctgggtgtggaggcgttggagcatctgagtccaggggaacagcttcggggggattgcatgtacgccccacttttgggagttccacccgctgtgcgtcccactccttgtgccccattggccgaatgcaaaggttctctgctagacgacagcgcaggcaagagcactgaagatactgctgagtattcccctttcaagggaggttacaccaaagggctagaaggcgagagcctaggctgctctggcagcgctgcagcagggagctccgggacacttgaactgccgtctaccctgtctctctacaagtccggagcactggacgaggcagctgcgtaccagagtcgcgactactacaactttccactggctctggccggaccgccgccccctccgccgcctccccatccccacgctcgcatcaagctggagaacccgctggactacggcagcgcctgggcggctgcggcggcgcagtgccgctatggggacctggcgagcctgcatggcgcgggtgcagcgggacccggttctgggtcaccctcagccgccgcttcctcatcctggcacactctcttcacagccgaagaaggccagttgtatggaccgtgtggtggtggtgggggtggtggcggcggcggcggcggcggcggcggcggcggcggcggcggcggcggcggcgaggcgggagctgtagccccctacggctacactcggccccctcaggggctggcgggccaggaaagcgacttcaccgcacctgatgtgtggtaccctggcggcatggtgagcagagtgccctatcccagtcccacttgtgtcaaaagcgaaatgggcccctggatggatagctactccggaccttacggggacatgcggtaagtttttccttccagaaatgtcgcctttcggcccagggcagagtcactctgtgttctggggtatctagcggctcctacctgcgcgaacactcagattgcccctgggagagctcagcagggtaaacctagagctctcccgtggactcccggcctgccagaggtttaacctgagctctcctaatttctgctgcgtgccctgggtgctgattcctgccctcccagattcttcaactcccccaaccgccccaaattctcactacctcctggtactcgaggtcccaaacagaaatcctattgcacgggccaccttcagagataaagctcccaagccctccactcttcctttcctcctgtcctcaaagtctgagaacctcaacaggaatttgggcaatttctcctcttcaggtctgttaggatttcactttcagcctgcgcagattagagtcaaaaagaccggcccaatagcttctcagcgggtatcctccagagaggtaaagtgaaattctcggttagggaaagaaagtggtctctgggtgctgaggtctgctgtgtgaaagggtgaacttctttctcctgaagcaactggggacttgctccagggctggaggtcagtagagataatccaaaccgtcatgtttagagtaggcagaggggcaactttcttggtaaagacttcacaggatttgcactcacagtttctcaacgttggttgactatgttgaaagtagttgcttgggtcggttttctcttgtaaagtgtttattttctctgtggattataacagatccacagccccctacttcaggtttgcatcagatctataaagaggagaatattcttttaatgtacaatttaattaggcttgactctgacttacaaaactgttggaaaacatttttttgtaaagcatttcctgctatttcagtgtgctccaaaatctccactggggagggtggagtgaggttttttattatattcctttatttttaggacatgtttgcattttagaatatgtgcagttagct

SEQ ID NO: 6 - DNA, 5269 bp, Homo Sapiens
  unsure (460): unknown base
aagccggtacattttggaggaggaggggtttggccagtggtggcaggagggaggttgtggaagccagggttcttgttacatatgtgaagcctgtaatatgcttcagaaagaatagatggcatatgtacctcaaaaggtaaatgaccttaaacggtgtcagactcttagttaaatctctcccggatcagagaaagacctggaaagggaaggagattgtccacagaacacaaatttccctcgcaaaagatagctttgcacaggaccattccaaaatatgtcagaaatatattttggggtaaaatactttgatcgcccttagggctgctacctgtcatgtgatgctataccagaatcaggttggaatttgttttgagacaggttctcactttgttgctcagattggagtacagtggctgtgatcacggctcactgcagcctcgatctccttgatgtgggaggntcaagtgatcctcccacatcagcctcccaaatagctgggactacaggcggccaccaccacactgggctaaatttttttaaagtagagacaagttctccccatgttgcccaggctggtctctaactcctggcctcaacctccttattctctaggattacaggcgccaggctagacctcacaggtctttagacttctacgcaccaggtacctggtagggggagggattatagtggcagaagagcagtaccagtggcccacaccacacaccctggcctcagctggctggggcacacaaaaccaggtgctaccgtcaacgactaggcccatagggtactgctgtcaaaacctgctgccaacaacttccacacactccccaaaacgctcggtaggcggtggtgcgcagctttcaatgcatccgccgccaggcgctcacaggcaagggagaaagaagccagacggagctcggagatgtggagggcagacgcaggcgcatttggaaaagggactggcggtgggaggcgcagagggaaaaaggaacgacacaatcgggcttcctagccgctggcggacccgatggggcgtcctgcgagggttcggcgagggttctgccaggatagtagcattgcgcccaaggagtgagaggcacccggggctactggagccagaccctcaacccgccctagtgggaggcgaagaacaacgaaagcctcgtattcccatttctctaatggctaatgacattaaaggttttcatatggttatttgccatctgcatatcttcagtgaagtgtctgtttatgtcttctgactattttctaattggatttttaaaaataattgatttttgagttatttacatattctagatactggttgtatgccagatatatggcttgtaaatattttctcctaggtaaaccttttcagtatcgttacagggtctttcacaaagcaaaagttttaaatttatggagtctaattcatcaacatttctttttaccggtcttgccactaatgtcaatttaagaaccttttgcctagccttagacaatagtttgttgttttttaaaaccgttttgtaattttactcgtcacagttatatctagccacttaatttttatgtaagggttatttttggcgggggggaatctatagatgtcctgtcttttcagtatcatttgtggaaaagattatctgtcctgcattaaactgcttttggactttcgtctaaaatcagttggaccggtttttgttggcaaagttttgcctgaagcttattccaacaggtgagaaaaagtccacagtttaacagttcctccccaacctgtaaccccgccttgaacttctggactagcccctcgattgttgtagatgccaagcggacctcgcgccgctctgcgttgggccagcccctcacagctggtttcttaccacgtattgcgcaagcggaatctatgcctgttacccacactccctgcgcccccgcaccccgctcctgtgcgcaagtcggaatataaaaccgcggaggagtgagctcttggggtgtccagttggttgccgcggcagtctctccgagcagcgcatttgtcttctaggctgcttggttcgtgcctccgagaaaggtaagtctttctttcgcttttttaggggtacttgaaaacaacaagtgtcagacaaagcagcagatgctgttgcgcagtagaagtttatgggcgagttgtccctgaaactggaaccaggtctttcttggcgcgattacgcaagaaccacccgcagccctgcgggctcctggcaggtcctgcaactgcactttggatagtcccgttgggaagctagcactttttaatatagaagaacgaggtttgataagtgtgcgagcttaaaggttgacacagtgtccactattacagctgcgtaggtagctagtgttcaggaagtaatagtggagtcatgtagtgtgaaagtaagattgaaatgggcgaggagggtagcagccgccacagccaccagagagaaacctgaccttgcaggtgcgtggtgatgtccatgagccaggctggtgccgcaacagcagcggcgggaccttgagctccgcacggccgctgggtttggacgccctctggttcctggaaactttcacctccccctcagcctgaggccaggtggcctgggaaggtggaaggagtgtggaggggagtgggggggggggtccactgcctgagaatgagaattctcttcacatctggaaacttcagttatcacgtgtgtcctttaccaattttttttcttttattttctttttgatagagacggcggtctccctatgttacccaggctagtcttgaactcctgtgcttaagcgatcctcccaccttgacttcccaaagtgctggaattacaggcatgagccaatgcgcccggctgctttaccaattttctatgaatgaatttgtacatacatcccctagagcaggaagtaatgtaaaacagaataattagtaatgcacatttcctaatgtgggatgttggtggccaagagatatttggtctttactggaactcttgatactaacatggagtttataatagttgtggagagtgcagacaaggctaggatttctgtgactagagaactcttagtgcgtgaagacctaaggaaagctggattgttgatttttgttaataaataagatgtgaaagattgcatcactgtagcagaaatctcctagttttttaagctaaattctattaaaggtcatcattgctaaaggaattgtgcccaggatttggatagctgatgtcattacttaatattagatgatatcaactaaccacatctcatagactggaataaagtgctagattttacctgaaagctgcaaaaatgaatggtttagatatatgtatgtatttattttatatcaatttcaaatatttactgtattaacctccctggccccctttaatcaagaatataaaatcatctacttaaattttgccacttaagtttagaacactcttagaatcacactatcttaaagaagccagactagaattagaagcaagttaagtctgaagatataacaaccagcaacaacatttttttttttcaaatgaaaactctaatatggggtgggtatgttgtgtcacacctgtaatcccaacactttgggaggctgatgcaggaggatcacttgaacacaggagttcaagaccagcctggacaacatagcaaaaccctgtccctacaaaaaataagaaaattagctgggcatggtgtcacatgcctgtagtcccagctactcgggaggctgaggtgagaggattgattgatcccaggaggttgaggctgcagtgagtcatgatcgcatgactgcactccaacctgagggacagagcaagaccctgactcaaaaaaaaaaaacaaaaaaaaaaaaaccaccaccaaaactctaatatggacatattactctctcatgggacttgcacattctaaaaagggtccttttccccagtactgggagagtatgtgttcaactacgcagccagcaagacaggctagtttatatagggagtgtgctattcacaaaaagcctctcttctctttctggtattgtacatgacacaatcatagctgtacctgaagagaagtgcattttaaggaccatcatcacctagaaacatgtataaatttctatacctagtgccacaggaatgacattgccttgtactattcctacctctgtccagaggccagctatgtggtctgtctgcatggtgcctagaactttttccatctgacctaggatgcttctgaagcagtccccctgggcagctgtctggtatttaggatatacctgtgagaaaagtttcttacaaacctaatctactatgtttattcctgaactcaaaaagttcattgactgttcaaatcctgaaattttctctatttccataaggctgaattaaaagtactttgttaaaggtagtagccatggcaaaagaaaaaccactgttctgtagaaaaactcattcaatatttacaatcttttctaatcagagattagatcctgaagagaaaggttcatatatatatatatatatatatatatatatatatttttttttttttttttttttttttttttttactccactgtcattgtgactaaggattcatgaactaagacccctccctcagctcttggtggcacatggtgacagcatgctcagagcaaaggtgctccccatgcctcttctggggctgcactgactgcaggtacctcccctctctacatcccacaccactgataccaaaaaccccctcctttctcctgtactgatgactctgtagctttaaccagggcggcggtgtcactctaaatgtcaccttggcattcagccccatagagtggggaaaattccctcacctgtttctctttgactgttcagtcctcttcaattaaaatcttaattttacaagcgaggaaatgagagtgtttcttgtaggggtgtagtgagaatttaataaaacagtttaaggaaagaaaacaaaaggtagtattgctgcactttctagatggtaaaaagcaaaccaccatgtctgtttaatatatatcacctgctggtccctcggtctagcaggctgaactgtgtgcctgggaattttcttctcgctgtgtgcacccctttacgtcacagggtggactctcttcagagtcctagtggagcagctggccaggctgacatgatctgacaacattgtaggttaccactaccatctctcaccgtctcactttcttcctagg

SEQ ID NO: 7 - DNA, 4558 bp, Homo Sapiens
caacctcaggtgatcagccagcctcggcctcccaaagtgctgggattacaggcgtgagccaccgtgcccgaccaattttttttttttttttttgagacggagtctcattctgtcacccaggctggagtgcagtggcgtgatctcggctcactgcaagctctgcctcctgagttcacgccattctcctgcctcagcctcccatgtagctgggactacaggcgcctgccaccatgcccggctaatttttttgtatttttagtagagacggggtttcaccatgttagccaggatggtctcaatctcctgacctcaggtgatccacctgccttggcctcccttttgtgtatttttaaaagagacggggtttcgccatgttaggcaagctggtcttgaactcctgacctcaggtgatctgcctgcctcgggctcccaaagtgctgggatgggattacaggcgtgagccaccgtgcccggccttttttttttttttttttttttttctagagacagactctccctctgttgccctggtgcaatcatagcttactgcagcctcgacctcctgggctcaagcaatcctcccacctcagcctccccagtagctaagaccacaggcatacaacaccatgccttgctaattttttttttttttttttttttttttggtataagcagggtattgctgttgcccaggctggcctggaactcctgcacctggcctcaagcgatcctcttgccttggcctcccaaatggctgggatgggattctaggcgtgacacaccgcagctggctgccttttttgttgttgttgagacaaggtcttgctctgttgcccagggcggaatgcagtggtgcaaacatggctcactgtggcctcgacttcctgtgctcaggtgatcctcctgcctcagcctcctaggtagctgggaccaccaaatgcacaggtgtgcactaccatacccagctaatttctaatttttttttgtagagacatggtctcactttgttgcccaggctggtcttgaactcctgggctcaagcaatcctcccacctcagccttccaaagtgttgggattacaggcgtgagccactgggcccagcctctattgagttttaatctccgtttacttgactatcaccttcaggatttcaaacatccagagaccaccaaggtgcatggtgcacaggtctaaattgcaggttgaatctcaatctagtattagtattccccaatgcgactacagaactgattattactatttattttttttgagatggagtcttgcactgtcaccagggctggagtgcaatggcgcaatcctggtttactgcaacctccacctcccaggttcaagggattctcctgcctcagccttccaactagctgggattacaggcgcccgccaccacacccagctaattttttgtatttttagtagagacggggtttcaccatgttagccagaatggtctcgatctcttgacctcgtgatctgcctgcctcagcctcccaaggtgctgggattataggcgtgagccaccgcgcctggcccagaactgatgattaacccagctgagcctctgttcatctgaatgggtattgtcaacagcactcacttacaagagttgctgagaagatccaatgagacaaatagttgctaaagtgccaggcatgcagcagtgcttaagaaacttctcaccctgggttttttattggtattgattgatgtagaggtgggggagaagatcaaagacaaggattgagaatcagggatgggaaaagcagtgggccactgacagccgccctgcctgcctgggaggtggggtggggaaagtgggcgggacatgctcctgggcctggcccacccagatcaccctacaggctgtcggcctgtgcgtctgcatccggtggccacagagcaacttcctctagagggagctgattggagccgggtgccgctggcacctctatgatcactggagtctcgcgggtccctcgggctgcacagggacaagtaaaggctacatccagatgccgggaatgcactgacgcccattcctggaaactgggctcccactcagcccctgggagcagcagccgccagcccctcgggacctccatctccaccctgctgagccacccgggttgggccaggatcccggcaggtaagctggaagggtcttgtccatcctcccagatctcagcagccccagccccagggtggggcagggagcctgccgggagccgggtggggaaggggaagctcaaggcttccctgggcaggtctgccgccccggctggggacctgatcctgccatgcctgcctctggctgcccctcacagcttcccctcttggcccagccctggatgccggagaactgtaagaactgggtcctttaacagtctgggagatgggagtggaggtcagagccaaggtcaagggcagagagagaactttctcagcgcttgctgctgcccaacatccctagactgggtccagggcctggccaggcatgtatccctgggcaacattcatcggggcccagcaagcccaggaagtcgggggtggctcccctcaccgggaatttaggccacttggatgggggaggcagagctaggcctgagtcagcataggttgctggccttggtgggtgttctgaggctctacctgctcccctcggaagcctggggtgttggtagagggagttggaggtgcagtcagcatcctccagccctactgtcctgggggtgccgggtcctggagactggggaagaaggaaggccatcttatgtaaggagctacggggggtgggaggcaagcaaaactctttttttttgttttttgaaatggagtctcgctctgttgcccaggctggagtgcagtggcgcaatctcggctgaccgcaacctccgcctccaaggttcaagcgattctcctgcctcagcctcccgagtagctgggactacaggcgcacgccaccatgcccagctaatttttgtatttttagtagagatggggtttcattatgttggccaagctggtcttgaacttctgacctcgtgggccactatgcccggctgcaaagttctgttttaacaaggccttgcccctagaggtggaggagaggaaggtctgccttcaccctgtccctgtccggcagatcgaggaggagtggggagctgggtgagggcacaggtggtccagccctcctccaccccttcttgagagctcttggggcactttcgaaaacactcccaggcctagcggaaggagggtgggcgaaggtccccaggccctgggcggtgggggtggggctgtgtgcttggcccagggtggggctgcacaccccctccctctgggataggaggagggcgctctccttctgagggctggaggctgcctggggaaatggggctctgggaggggtgcaaactgaaagtgaaacagctgacatccaggaaacactcgccctgatgaggggtcacagcaggttggggctgcggtcaggaccaggcaaagaggaaaattggggccggggacagaagaccaggtgtgtggtgggagtacgaggcaggttatggggcttcaaagaaggccctgatcctgagggctccctccggtcactgcaaggcagcagtggggaaggcacagacaggaggtaaatagggaaagttgccctgagaaagaacacactctgaggtccacaaactggaaaagaaatcttgcatgcgtgttgagtacatggactcacggagattcagacaaacaacctgactttccgtgactaacgatgtgacctcgggcactcaactctttgtgcctcacttttcctgcctgtaaagtgggtatgatggcgctcaccctgctgggttcatgtgagtttccagtgttcaccacccacagagtgctcctaagtgggagagtatatcttaggctctcaggaaatgtttgcggctaacagcccagagttaaaaaacaggtgtgttctggccagccagagggaagtagggcctctgaggacagccttcatgggccattggctgggcagtggctcgcttgcaataagcatgtgctgggtgggctgcaggaggccccaggaacagctaaaaaccccccaggctcttgccccaggagtggcatgaacttgagagccagcgggcactgctgcagccacaccctcctcgatggtgcagatacctcagtctgcccttggctgcctcaccttcttaccctgtctccctcaaagagggagtgttcagtaagttgtttcctcccagcagacttcactgggacccatgctggagtaagaataaaaagtcccagaggaggccaggcacggtggctcacacctgtaatcccagcactgtggatggccgaggcagactcacgaggtcaggagtttgagaccggcctggccaaagtcccagaggactaagggcctttctgggaatgggggatcctctctcctatgtggacatggcaacctgtatggggtccccagtcacaggtctgtgctcacccccatctctgctttttctcgcccttccccgcagg

SEQ ID NO: 8 - DNA, 5518 bp, Homo Sapiens
gtacaaattacattctcaagagtggggagaatattgcaaagtaccttcttaagtggggtggaggggagaatatatcatatcagttagagtggggcaggaacaaatcaccatggtggaatgtcatcagttaaggctattttcacttcttttgtggatcttcagttgcttccggccatctggatgtgtacgtgcaggtcacaggggatatgacggcttagcttgggctcagaggcctgacactcaccacatggcagctggctttccttaaaggaagtgatctgaaagggaacaaggtggaagctgtagtggcttttctgacctgtcctgtgaaatcacactctgtcatttccacaatatcctcttggtcacactgtttagccctattgagtgtgggcagagaccacacagcagcatgaatacctggaggtgtgactcctcaggtgccatcttggatgtgggcttaatagttttgattcagcatctttattattataaagagtttggctgggtgcggtggctcacgcctgtaatcccagcactttgggaggccaaggcgggcggatcatgagggcaagagatcgagaccatcctggccaacatggcaaaagcctatctctaataaaaatatcaaaattagcagggcgttgtcacacgcctatagtcccagctactcaggaggctgaggcaggagaatcacttgaacccggaggcggaggttgcagtgaactgagatcacaccactgcactccagcctggcgacagagcaagactccgtctcaaaaaacaaaacaaagcaaaacaaaacaaaacacacaaaaaagagttttagtcaggcacagtgacgcatgcctgtagtcccagcactgtgggaaactgaggcaggtggctcacttgagcccaggggtttgagaccagcctgggcaacatggcaaaaccctctccctacaaaacatacaaaattagcagtgcatagtggcacacacgtgtagtcccagctactccagaagctgaggtgggaggatcccttgagcccaggaggtcgaggtggcagtgagccacagttgtgtcattgcactccagcctggacgacagagggagatcctgtctcaaaataaataaataaaaataaaaataaacagttttgacttcacaactagctaaaaagtgtattccctcactcagtgactgtactgttcagaggtgtatacctgcattaaaagccctttccttccttctctgtaactggagtagggaagggccaccttctgccatgactggaagcttcctgaggcctccccagaagcagaagcctgtgttacacttgctgtacacagtctgcagaaccatgagccaattaaacctcattttttttttttttgagatgaagtctcgctctgtcacccgaggtggagtgcaatggcacgatctctgctcactgcagcctctgcctcctgggttcaagtgattctctggcctcagcctcccaagtagctgggattacaggagcacaccagtacgcccagctaatttttgtatttttagtagagacagggtttcaccatgttggccaggctggtctcaaactcctgacctcaggtgatctgcctgtcttggcctcccaaagtggtgggatttcaggtgtgagccaccacgctggccaaggacatggtttcttacagagactttgttctctaaattcataaattgttggaaattctatcagtaaaaatgaaacatccgagtcttgctgacaggatctaatccacttgatacagagtagcagccttgatttccaaagcaggtgcacagcttcagataaagggtttctggatgcaacatttcacatgtaccttcttgtttccagcgattcaggacactggtttcacttcacagtcctgatccaatgttgaccttgctttgctctaagctatcatttggttgtcacctaagctctaccctccccctttatcttggctttttcttttcttttttctttttgagacaggctcttcctctgtcacccagtctgattgcagtgatgcaattgatcacagctcacggcagccgggacctcccaagctcaaacaatcttcccacctcagcctcccaagtagctgggactacaggcacgcaccaccacatccagctaattttcttttttttctgcttccttttctttttgtttttttttagatagaggcttgctctgttgcccaggctggggtgcagtggcacgatcttggctcactgcaacctctgcctcttgggttcaagcgattctcctgcctcagcctcccaagcagctgggactgcaggcacgcgccaccactcccagctaatttttttgtatttttagtggagacggggtttcgccatgttggctaggctggtcacaaactcctgacctcagatgatacacccacttcggcctcccacacagctggtattacaggtgtgagctaccacgcccggccccccctcctttcttttgttttttagttgacacagggtctcaccatggtacagcccaggctggtcctgaactcctggcttcaggtgatcctcctgccttggcctcccaaagtgctgggactataggaatgagccatcacacctggcccctttcttcaattttcaaaacaaactgatccttcaaggtcaagaggaaatacctcctctgagaagtcttctctgaatgtcagaggcagacaatgtctgatttctgcatgctccccaacattcaatcatacagttattgaataacacattttgagagataactatgaatcaagtaacatgctggtttctgggagaattgaggacaaattaaccttgtggaaattttgggtggatgaaaaaaaccaacatgaaattaaaacactgcacacatttacagctgtgagaagcattacacatcctgggtgctatgcgagctttttttttttttttttttttttttgagttggagtttccctcttgttactgaggctggagtgcaaggtcacgatctcagctcactgcaacctctgcctccagattcaaacgattcccctgcctcagctcccgagtagctgggactacaggtgcctgccaccacacctggctaatttagaatttttagtagggatagggtttcaccgtgttggccaggctggtctcaaactcctgacctcaggtgatctacccatctcggcctcccaaagtgctgggattacagaagtgagccactgagcccaaccaggagctttttcgagaaagaaggaagtccaagagatcttcctgacaccctagtctgactctgccctttgcctgctcaaaatttccccatgcttcccagcggccttctggacatagatcaagtcccttctctgacaggcccaaaccctttatcatctgatcctagctcatttttctgagttttccttagttgctattattttctgtctaaagtgacatgtcataatattcataaagcacacaagtcttatgtgtacagctcaatgaattgtaaatatgtgtatacccggccgggcacagtggctcacgcctgtaatcccagcactttgggaggccgaggcaggtggatcacttgaggtcaggagcttgagaccagcctgaccaacatagtgaaaccccatctttactaaaaatacaaaattagctgggcgtggtgtcgcatgcctgcaattccagctacttgggaggctgaggcaggagaattgcttgaacccggaggcagaggttgcagtaagccgagatcgtgccattgcactccatcctgggcaacaagagcaaaactccgtctcaaaataataataataataataataataataataataataatgtgtatacccatgtaaacaccattcagataaaaatatggcatatttggggcacccggggagtgtctcttgtggcccctcccctccataccctgctgatctatcagcacagattagtttctgccactttttaaacttcatattccttttctttttacacaaacacaaacattcgagtcatgactgggtggggtggctcaagcctgtaatctcagcactttgggaggccaaggtgcgaggatcgcttgagtctgggagttcagagaccagcctgggcaacatagagagacctcatctccacataaaaagttttaaaaattaaccaggggcggtgtagtcccagctactcaggaggctgaggtgggaggcttcagcccgggaattccagactgcagtgagccatgattgggccactgcactccagcctgggcaacacagtgagaccctgtctcaaaaaaaaaaaaaaaaaaaacaggaaaaaacaaacaaacagaaaagcaggcctggcgcggtagctcatgcctgtaatcccagcgctttggaaggctgagacggggttatctcttgggctcacaagttagagacaagcctgggcgtgggctatattgctagatccaggtctctgcaaaaaacaaaaccactcagtttttagtcatctataacgtcctgcctggaagcatgctattttgggcctctgagcttttgcacttgctaattccttctgcgctggggagagctcaaaccctgcccgaaacttctaaaaatggtgcctggataaatgaaggcattagagctgcgattggacggacggctgttggacggcgccactgctggcacttatcgggagatgctcattggacagtcacgtgacgggaccaaacctcccgagggagcgaggcaggtgcggtcacgtgacccggcggcgctgcggggcagcggccattttgcggggcggccacgtgaaggacgcacgttcagcggggctctcacgtgacccgggcgcgctgcggccgcccgcgcggacccggcgagaggcggcggcgggagcggcggtgatggacgggtccggggagcagcccagaggcgggggtgaggcgggaggcagacgggcgggaggagggcgagccccctcgccggcccgtccgggatccttcctaccggcctggggctgtgcgatctccaagcactgaggggcagaaactcccggatcgggcgctgccagcctccagtcccctccgtcctcggaggttcctggctctctgatccccgtgtcccgatccctgcctctctggcgctctcggaccctcgagaaccaggggatctcggaagccaagcccccgggcaggcccgggcttgtcgcccgcaccacttcctgcctctggcactggtgggaggggcgggtctcgcctctgccccctcaggccaggggtctggatgcatatagcgttcccctagcctctttccccggggagaatgtaggatacaggcccagcctcctggcctttctccatcagggactcagttgtctgggcccccccgtcactttatctgctagggtcccagaagtccagggtcccagctctgtcctccctcagggccgtgagtctccacagtctcctgatcccctagaacccaagagtccaggtacctcttcccttcctttctcctctagg

SEQ ID NO: 9 - DNA, 3628 bp, Homo Sapiens
ctcacacggccagaaagggtccaggcggttcccggcgcttttccagcccttgttttcatggcgcaccctcccgccagccgcccccctccgcactccgtcgtccgcccggcccggccgcgtgcggttccccgggagcccccaccccgtcgcggaccccagcgaccaccaagtccgcacgcggcctgccgcaggcctgagcagaaggccccgcgcacacccaccgcgccgcggccgcgcgggaggcctgtgccgcccgcgccacccactggccgggccccgcgggcgcagcggagcgggcgggtggccggcccggacgcgccctccccggccgcggccccgcgcgccatgtgcccccggcgggacgcgccactcccgggcctgccgcggcgcctttaacccgggccagggagcggggcggagggggcggtcgggtggctcagaggaggcctctttctttcttctttttttgaatgaaccgtgtgacgttacgcacaggaaaccggtcgggctgtgcagagaatgaagtaagaggacaggcaccacagccccgctcccgcccccttcctcccgcgcccgcccctccgcgccgcctgcccgcccgcccgccgcgctcccgcccgccgctctccgtggccccgccgcgctgccgccgccgccgctgccagcgaaggtgccggggctccgggccctccctgccggcggccgtcagcgctcggagcgggctgcgcggcgggagctccgggaggcggccgtagccagcgccgccgcgcaggaccaggaggaggagaaagggtgcgcagcccggaggcggggtgcgccggtggggtgcagcggaagagggggtccaggggggagaacttcgtagcagtcatcctttttaggaaaagagggaaaaaataaaaccctcccccaccacctccttctccccacccctcgccgcaccacacacagcgcgggcttctagcgctcggcaccggcgggccaggcgcgtcctgccttcatttatccagcagcttttcggaaaatgcatttgctgttcggagtttaatcagaagaggattcctgcctccgtccccggctccttcatcgtcccctctcccctgtctctctcctggggaggcgtgaagcggtcccgtggatagagattcatgcctgtgcccgcgcgtgtgtgcgcgcgtgtaaattgccgagaaggggaaaacatcacaggacttctgcgaataccggactgaaaattgtaattcatctgccgccgccgctgccttttttttttctcgagctcttgagatctccggttgggattcctgcggattgacatttctgtgaagcagaagtctgggaatcgatctggaaatcctcctaatttttactccctctccccccgactcctgattcattgggaagtttcaaatcagctataactggagagtgctgaagattgatgggatcgttgccttatgcatttgttttggttttacaaaaaggaaacttgacagaggatcatgctgtacttaaaaaatacaagtaagttctctgcacaggaaattggtttaatgtaactttcaatggaaacctttgagattttttacttaaagtgcattcgagtaaatttaatttccaggcagcttaatacattctttttagccgtgttacttgtagtgtgtatgccctgctttcactcagtgtgtacagggaaacgcacctgattttttacttattagtttgttttttctttaacctttcagcatcacagaggaagtagactgatattaacaatacttactaataataacgtgcctcatgaaataaagatccgaaaggaattggaataaaaatttcctgcatctcatgccaagggggaaacaccagaatcaagtgttccgcgtgattgaagacaccccctcgtccaagaatgcaaagcacatccaataaaatagctggattataactcctcttctttctctgggggccgtggggtgggagctggggcgagaggtgccgttggcccccgttgcttttcctctgggaaggatggcgcacgctgggagaacagggtacgataaccgggagatagtgatgaagtacatccattataagctgtcgcagaggggctacgagtgggatgcgggagatgtgggcgccgcgcccccgggggccgcccccgcaccgggcatcttctcctcccagcccgggcacacgccccatccagccgcatcccgggacccggtcgccaggacctcgccgctgcagaccccggctgcccccggcgccgccgcggggcctgcgctcagcccggtgccacctgtggtccacctgaccctccgccaggccggcgacgacttctcccgccgctaccgccgcgacttcgccgagatgtccagccagctgcacctgacgcccttcaccgcgcggggacgctttgccacggtggtggaggagctcttcagggacggggtgaactgggggaggattgtggccttctttgagttcggtggggtcatgtgtgtggagagcgtcaaccgggagatgtcgcccctggtggacaacatcgccctgtggatgactgagtacctgaaccggcacctgcacacctggatccaggataacggaggctgggtaggtgcacttggtgatgtgagtctgggctgaggccacaggtccgagatgcgggggttggagtgcgggtgggctcctggggcaatgggaggctgtggagccggcgaaataaaatcagagttgttgcttcccggcgtccctacctcctcctctggacaaagcgttcactcccaacctgaccgataacgcctgccatctaaaagtctttaacttgcttgctagtcgtggagatccaaagatctagcgtttgtaatccagtaggatgtggtggtaaatggtaccccttcagtgtttctcaagctgaaggtccaggagtccccaggaccaccgtttcctggcttgagcagcttgttggaaccggagggaggtttcagggactgcttatgaaccagataccaggttgggtcttgacagtctgcatcccaaacaagctcccctgaaacaagcccgttgtacactaaaattggagaacaacccgattagaagaatagactccacagaagaccaagggcatcatcaatcggtaaaattttccaaaagaggaaaaccaatgtaagtctttttccctgaaaaacttagttgtgtttgtaaagagctaagttgacattccaaagtccttggactggaatctccagtgtgtgccatgttcccagtgggcgtgatgaggtgtcctgaggagtatcaggctatggctttgctaccttgtcagtgacagaatttgcatcggctgcattctttgtattctataatttgtgtatggtttaccagtttgctagaatgttagaatcttttgtttttcaccactcagagtggacctaattttgtggtcggctgaaaaaaatttgcatctaggtatctatgtaaagtgtagaagaattgattcttagctgtggattatcttacccttactttagttgaagtgattgatacctgtggctttgaagaacatttgtgagatgatctttttctcgtactgtgctagatagagctttcatcattataccatacaatt

SEQ ID NO: 10 - DNA, 4603 bp, Homo Sapiens
ggtcagggccccaccttccctggaactggggtagtgagtaacccagcctgctgtgctccggcccccctttcccaagaaggttttttttttttttttttttgagagagtctttctctgtcgcccaggctggagtgcaatggcacgattttggctcactgcaacctctgcctcccgggttcaagcgattctccagcctcagcctcctagtagctgggattacaggcatgtgccaccaagcctggcgaattttatgtttttagttgagatgtggtttcaccatgatggccaggctggtcttgaactcctgacctcaagcaatctgcccacctcagcctcccaaagtgctgggattacaggtgtgagccactgtgcctggccaggacttgtctttttcttttctttttttttttgagaaggagtcttgctctgtagcccaggctggagtgtgatggcgtgatatccgctcaccgcaacctccacctcctgccttcaagcgattatcctgcctcaacctcccgagcagctaggattacaggtgtgtgccaccacgcccagctaattttttgtatttgtagtagagacagcgtttcaccatcttggccaagctggtctcgtgatccgcctgcctcagcctcccaaagtgctgggattacaggcgggagccactgcacctggccccaggacttgtctttcttaagcacagaagttctctgaatgatgcctaggacatggaaaggacattttaatacatttgctaatcaaagcatcataaatcttgctttttttccccatagataaaacatctttctaagactctgtacctctttccagagtgctgcacatttgagttagcttaattatagtgtagtgactttgatccaaacttgctggtttaaatcttggctcttccagccgctcactgtgtgaccttgggcaaattaattaacctttctgtgccttagttttcacatgttaaagcagcagtcatagtaatagtatttatcttacagtgttgttgggatggtgaaatgagtaaatatttgtaaatgccctggcacatggtagttgcaatattagtgtgcagtattgtttttatgattagaaataatgtcttcaaagtctcactttcctgctggtttgaatgtgctgtgagaacacatactgtcagttttgcctaccacaaatttgttgagtctcttgcaggtacctccaaatgggcttgtaattcaccatccccacttttcttttttttttcctttctttttctttttatttcttaatttctcccacaaagactgaaagtgaatccccacttttcttttatcttttaaaaattttatttgtgggccgggcacggtggctccatgcctgtaatcccagcactttgggaggccaaggagggtggatcacaagctcaggagttcgagaccagcctggccaacatggtgaaacctcgtctctactaaaaatacaaaaaattagccgggcgtggtggcgcatgcttgtaatcccagctactcgggaggttgaggcaggagaatcacttgaacacaggaggcagaggttgcggtaagtggagatcgctccattgtttatttgcatgtggacataagaaagggttaacatggccgacaactatttcatgagctttttggctttatttgaaaagtgaagtgtgtttggggaaggagttggttaggaaaacagatgcttccctttttgacttaccaaggaaatggagatccaaaggaaagcctgaagcactttgtggcttccacgggttcgtttctaggaagcttttgctttacctggggaaaccccaagctctacagtgagaaagttgtaaattagcctttaggagacgctgtttgtcaaagttatcttaaccctggaaaaggggagggaaaaaggcagataagcagtgatgacatcagcaggaaactagtatcaggctacccagtcctgaagattcagttttcacttaaacaaccagcaagtcttgaagtctcttcccaagcaaatgggagcttctttggaccttggagcacacagaggattctactttctttaaaactttgttttcaggcaatttccctgagaaccgtttacttccagaagattggtggagcttgatctgaaggtatgtaattaacaacccttcttactccagagtctcatgcttgaatcttttcctttgcttcatggcttcgtgttgtagaaacttgcaaaaacttgtcagcaatggcactattttttcttagatttctttgtcatgcctgggaaaacaaaagttaaaaaatccggaagcctccaacatagccttttaccggggcagaaatatgttagctcacagagacaaagtttggtagactcactaaaactagagatcagaattgtcaagaaaccacaaggcaaatgctagatgcggtagaatagaaaggtgtctccaataaaccactcatttgacctcagggctagtagcagggaagatcccctggattatcacattaaaaatgacatttttttgtttcttttaacaccaaaagtaatgtgtatgctcacatatgcataaaatttgagaaattcaattggaagcccagaaggaaatttgtattatctatagttatgtcacctcgatataaccactgtttgttatggaggttttgatttttgctgtgtcttccttcctttatttatttatttatttatttatttatttatctatttatttatttgagacggagtctccctctttcaccctccagcactcaagctggagtgcagtggcacaatcttggcttactgcaacttccgcctcccaggttcaagcaatcctcccatctcagcttcctatgaagctgggaccacaggcatacaccaccaagcccagctaatttttgtattttttgtagagacggggtttcaccgtgttgcccaggcttgtcccgaattcctggcctcacagtgatccacctgcctcagtctcctgaagtgcttctctgattataatgaaatttagtatgtagaataccatagtttatagactagtcagatggaaacattgactcatgtaatttttatcttccttcgctgatttgagcaactcttgtctaaaatcaccctttccttctgaggtctaggaggtttttttgttgttgttttgttttgtttttgaggcagggtcttgctctgtcacccagggtggagtgcagtggcacaatcatggctcactggaacctccatccccggggctcaaatgatccttctgcttcagccctctgagtagttgggaccacaggcgtgcaccaccatgcctggctaatttttgtattttttgtagagatggggttttaccacgttgcccagtctggtcttgaactcctggcctcaagtgatccacccgccttggcctcccaaagtgctgggattataggcgtaagccatgacaccccacctgttccttcctttataaagtattttcttgtttctaaaaatagccaagttctgcatattgactacatacctcaagtgcttatagaataaatagtattacaatgaaaattttatcactgcattgctcctctgattatgatgaaatttagtatagagaatagcatagtttataaactgatcagatggaaacattgactcatgtaatttgtttttttttagtgaaaacaagtttattagagaagtaaagaaacaaaagaatggctactccatagacagagcagccgactcatgtaatttttaacttcctacactgatttgagcaactcttgtctaaaaccaccctttcctcctgaggtctaggatattttatttatttatttttctttttgaaacagggtctcactctgtcacccagggtgaagtgcagtggcatgatcatggctcactgcaacctgtgctccccaggctcaaatgatccttccatcctcggcctcctgagtagttgggaccacaggcatgtgccaccatgccctgataattttttgtatttttagtagagaccaggtctcgccatgttgctcaggcttgaggtctaggattatgccttccctttctgtaagataaaggcctgccctcttacaggtagcagtctgaagttaagatgtaacacacatacctcacggtaccttgctgtctttgggttgatagatcataaggataaccctgcctcccccagattgctttgtgtctaaaacttaaagcatagagccaagtgctatttctgccacgtgctggaaatgaatgtaagggctccaatcaggctaccaggcttgagaaaaattgtgctgtgtccctccatcttaactttctctctctgggaacattttgatttgggagaaatcaaggtgaattgaattccaatataagcaccctccaagtttcctaaaaagtaacttgcaagtgttggggaaaagttttctgggctgttgctttttgaagtagcctcgccgtaatttttatttttcagcacttctaggaaagtctaatgcccagaacggagaaggttgtggtgaggggagggcctgggaagtcagggggccatatgtcctcactctctaactccctgccccacctctctgtccctttcagg

SEQ ID NO: 11 - DNA, 2527 bp, Homo Sapiens
ataaaaaaagacatgaaatgaatcggggaaaatatttgctacataactaagaatgaaggcccttaataaaatctgtaaaactatacacacttttaggaatgaatcaacaaataatttctatgaattagaaaaaagtgacaatccaactaaaaaatgaataagggatataagcaatgtgtttcacagaaaaaataaaaattgacaatgaagttatgaaaaaatgttcagtctccttagtaattgcacaaaacaaactaaaacaatgagacattacccctaagattagtaaatgttaaagaaaaataataattggtgagggtgtggggaagtgggcacttacacctatgtttggaaatataaattggtgcaaccttatagggagagcaatctcacaacattttccaaagacttacatgcacaaccctatggcagagaaatttattcctcttccaggattttttttccttcaaaaacagtgatgtggatgaaaaacacatgttcactactgcacagggtataacagctgaaaactggaaacgataatactcacattcccttcagtaggggaatggttaaataaattttacaagccatctggtagataccaggcatgagctaaaagttagggtccagttagagatggaaagcacaccagtaatttgaaagggaaaatgtaatatgaagaattattaactagtaaaagaaggctaactgctaaaggtacaagagcactcaagctgtctgcagtcagcaggccccggctggtgagcaggaagctgcccgctgggaggctgccaaagttccctgaaggtgagcaccactggttctacaagctgctggcagtcatggcgttaagagcaggaagagaagcaccagaacccggaagagaaatccagtcctctgctaggccttgcaccgtccctctggcgccctctactgacaaagccagtaaaattgtgccgctagcaaaggagatctttttatgggatgtagcttggtgtcaccaaagagaacagagtggacttggagctcagatgcaacacaatgattgatactggcacagtatacttaccctgcttttgtaaacaaaatggtatatgtgatgtctctctttgtctctctgtatataaaacaatatttgtttctacttattatgtatttatgtctttactctgcatgccaggagctaagtattttgcatgtattaactcattttgttctcataataaccttcacatgcaggaatcattatagctactttatgaatgagccgaggaaggcactgagacgttaagtaacttgcccaaggtcacgcagctagtaagtggcagagcaagaattactatggctttataagcctaggaaaaagtctgaaagaatcaaaatgttaacagcggggacctcaaggaagcattgaagaggccatgggagaagttttcactttgttaaaaaatcagtccttcaaataaataaatacagtgaggcttccccagaagcagatgtcactatgcttcctgtacagcctgtggaactgtgagccagttaaacctcttttctttataaattatccagtcttaggtatttctttataacagtgctaggatgagctgatacagtttcctacactgtaacctaaggcaatgctttgcacaaagggatgagccagattgcttagtaattaaaacgcaaatacaaaccacaagcatatccattcatgaattggggggctgctttgtgtgcatagataaggtatattttttaaaaaaattatttttccaagaagaaaataaaccagttaataaacgacaactcacagtgccaggaagtgagaaacaagtgtgtgataaacggtggagaatgggagcactctccgcagtgggcgggaggagacgaggagggcgttccctggggagtggcagtggttggagcaaaggtttggaggaggtaagtcatgtgctctgagtttttggtttctgtttcaccttgtgtctgagctggtctgaaggctggttgttcagactgagcttcctgcctgcctgtaccccgccaacagcttcagaagaaggtgactggtggctgcctgaggaataccagtgggcaagagaattagcatttctggagcatctgctgtctgtgagattaagcactatgtatattgctttattcactccccacagcaaccttaccaagcagttcttttccacgtgaaaagatggaggctgggtggagcaaaaggaggtatttagagtcctcagcaagtgagaggcagagctgggatttgaatccagatctgcctgatactgaagtctaggctggttccacctctccggactgctttccagggagtagaagacagatattttaccttagctggctgcttctagaagtctgaccctgctggctcaaaacgactttagttccttgcccagaggctgcgggctgcgggtcaagacatcagtagaaggagggcccagccagagaggctgacatgggcttctactcaccgtcatctctccttccttccagg

SEQ ID NO: 12 - DNA, 7809 bp, Homo Sapiens
ggataaggcacaggtaagtgaaggaaactttctttgagccaatgagatagatcccttgcggatataaagagctttcatatctccctgtcttgtttttatttttttctctttgcatttatcactatctaacatagtatgtcttatttattgatatagtttatcacctgatccttccactggaatgtaaactctaaaagcagggattttgttttgttcaccttcatgttcttagtgtttgactacaggctcaataaatattcgtagaagtgaacgaatggggctgaggttttggtgctcaagagattatattctaaggtggattcttaagagtgtggcttacagagtcaggttcgggtttcaatcctgcctgcctcggccacttagtacccaagtgaccttaaacattcgtttccctgaaccctagggtctacatctgtaaaaccggcggggggtgggaatactttcctggcaggattgtagttaaggataagtgaaataagcatgaaaagtggctagcacgatgcctgggacttagcaaatgctcagtaaacagaaacgattatttttgaaatgtgaaaatgaaccgttcagaacgatgggagtttacaggactagatttctgccgtttttttttttttctgtgtgggaggtgttagggtgggagggagggaagagggaatggaagactgtgtaaggtgggcttggttggatcagacactcgagtttggaacagtcaactgcgatctgggcacaagggcggtgaggggagcttatggttttacttggggtggaggagggggctaaggggaagccatgccccggaggaggttgaatgggcgggacagatcacggctccactcatggtttccctcttgctggaagtgtgacgactccctccggatctctgtaaaagcggggctatagtgaattctggcgaagggcccgcggtggaccaggaactggtgccagaattgcaaaagggcacctgcgcccggagtggggaggtgatgcgggggcggggcggggccctgggggcggggcgagtcgcggaggtgccgccttggggcggggcggtgacagaaggatggatcctgggggtgaggattgactttgggggcggggcgagagtgcgaactggagtctgaggctgagcggtgacgcaaggacgattctgagggtggagcgaggggaggggattggctcttggaggcggggcggtggcacgaggctagcccttgggggcggggcggtggcgcaagattgaccttgggggcggggtgggggcgtgggttgaatcctgggggcggggcggtggcgcggaatggattctggggtcggcgcgaggcgctgaggtgcgtcctgagggcggggcgatgacgcagagcgaatcctgggggcggggcgagaccttctagatgcgtcccggggagtgggcggtgacgcggtggcaggttctggggacaggcggtgaccccagaattgaccctggggacagggcgaggcgcggaggcgtcctgaaggcgaggcggtgacgcaagagcgaatccttggggcggggcgaggcgttggagatgcgtcctgcgggcgggacggtaacgcgggggcggggcggtgacgtgaggtcagtgcggggatacggggcgggttctggggcggggacgcagtggtggattctggagcggggcggtgacgtggggcgggttctggggcggggcggtgacgcggagcgtgttctggggcggcgcggtgatgggaggcttggccctgggggcggggcgaggcgcagaggtgcgtcctgagggcggggcggtgacgcaagagcgactcctgggggcggggcgaggccttggagatgcgtccggaggcggtggggagcgaagactgacccggggccgtgacgcgggggcaggccctggggcgggggcgggtcctggggactggggcgggcggccgaggcccggaagcggactgaggcggcctggagtcttagttggctactcgccatggacgaagcggatcggcggctcctgcggcggtgccggctgcggctggtggaagagctgcaggtggaccagctctgggacgccctgctgagccgcgagctgttcaggccccatatgatcgaggacatccaggtgcgcccccggccccctgtccccgcgctgcacggccgggtccccacgcccctcgaggaggcgttgtgcgggagcctagccttccctgtggcttcaaacccctcagcggagccaaagaatcccaaacacctcttagtcgggtgttcgctaaagcgattccatgccatactcagtcagcgtacactgttagtgcttgtgtttcttgtgtaaaggaaaaatgtgagacacatcttgagaactttgaataagaaacaattcatgaattggagaacatcagactgaaagagctttagtgttgcaatgacaaaacgtcagaggcaagtatttattgggaaaatgtggaagcaaaataaagaaattatttgattggtttgcagttacaaaattgccttttttttttaaggtctgttaattgactgcttttggctggtcttaagttttatttctctctaacataagcatttatcagatatgacccaagttaaattttgcttatgtttgcagtttaagcaagatttaggtcacttaggatacctgattggttttgtctgctcaggaattcttcatggttggtctccattttaatttacgttaatacttgcgaggaaggaggcgtgtgcgtttttacttttctagcatagaggtttcgggaacccactttggcatcaggctgcctggcagcgtgttcttgggccagtcacttaccctctttgagccacagtttctgggctgtgaaatgggaataagaataatactgtcataaggactaaatgaaataacggatgtgaaactgtagtgctaggcacagagcgggggatcagcgtaccctgccctctttggccagccccttctgtgttcagtttatgttttgttaagaggttttggaaatgaggggacctgatgcagaatggagaataatgaagtcaaacatttgaggttttgtttaaaagcactttcccatctttgtctcatttgaccctcatcacaggcctgtgaggatgcaggagatatttcctaccatgaggtgcagtaggtgtgagtggctggctggatatccctggccagtgccctggcccagggaaagagtctttaaataattgagtatcatatgagtaattattcattaataataaaataagttttgtgccttctgtgtggcccctactggggaacagtaatggtttgaggccacagtccttgccttcaggaatgttcacggggatcacaaactcaaatgcccatggaggaccaatggatgggcgtcatagtggatagcctttgcactgccctccgtctccagctgagtatggccatatcaacaaatggcccagtattgccacatcttacacttattttgaggcagggtctcactcttgcccagcctggagtgcagggatgagatcatggctcactgcgaccttgacctcctgggcttaagtggtcttcctgcctcagcctttagagcagctgggactttaggcacatgccaccatgcctggctaattaaaaaaaattttttttttgtacagataggagtcttgctatgttgcctagatgagtctcaaactcttggcctcaagtgattctcctgcctcagtgttgggattacaggtgtgagccactgtacccggcccagctttcacatcttaaaaaagaagctgaaaatcttgattcctctgtcaaattccctggcttaaaatgttagcaacaaattcagaaattttttaagaaccttgtgggaaccacaggttgccattttgccattcagtatggctgaaaaacaggcaggttttggaaccagttggatctgggctctcatcctggccttgttacatattagcaagttgtaaaaaaccacaaccaatgagccaaacaaacagaaaaaccctatgactcagtttccctgaaattttttaccctaaaaagttgggaagttctaatttaactctataaagttattgagggagaaaaagatgaaacaatgcatttaacacagtgttgacctcctggagtgttcagcaaatgtggagagaaacctaaacaccaccatctatttgcatgtagccaactgttctgctagtgagacttaccttctcagtggcactgtaggtctgtgctgttcccaacagtagccattagccacatgtcgttaaaggtaaatttgaagtaattaaaattaaataaaactaaaaattggtagggtcaagccttacagggcctgtgggtttttctcctcgtgtgcggagatgagagatcgtagaaataaagacacaggagaaagagatagaaaaaaagacagctgggcccgggggaccactaccacctagacgtggagacagggtagtggccccgaatgcctggctgcgctgttattggatataaggcaaggggacagggtaaggagggtgaatcttctaagtgattgataaggtgaagcaagtcacgtgatcataggacagggggcccttcccttttaggtagctgaagcagagagagaaggcagcatatgtcagcgttttcttctatgcacttataagaaagatcaaagactttaagactttcactatttcttctaccgctatctatgaacttcaaacaggaaccaggagtacgggaggaacatgaaagtgggcaaggagcgtgaccatggaagcacagcaccacagggaggggtttaggtctccggatgactgcgggcaggcatggataatatccagcctcccacaagaagctggtggagcagagtgctccctgacgcctccaaggaaaggagactccctttcttttttttttttttttgaggtggtgtcccactttttcgcccaggctggagtgcaatggtacgatctcagctcactgcaacctccaccttccgggttcaagctattttccttttttttttttttttttttgagacggagtctcgctctgtcgcccaggctggagtgcagtgccgcaatctcggctcactgcaagctccgcctcccgggttcatgccattctcctccctcagcctcccgagtagctgggtctacaggcacccgccaccacgcccggctaattttttgtatttttagtagagatggggtttcaccgtgttagccaggatggtctcgatctcctgacctcgtgatctgcccaccttggcctcccaaagtgctgggattacaggcttgagccaccgcgcccagccagggttcaagctgttctgcctcagcctcctgagtagctggaattacaggtgcgcactaccacgcccagctaatttttttgtatttttagtagagacgggtttcaccgtgttggtcaggctggtcttgaactcctaaccttgtgatctgcctgccttggcctcccaaagtgctgggattacaggcgtgagccaccgcgcctggcaggagactccccttcgcggtctgctaagtaatgggtgtctccccagacactggcattaccgcttgaccaaggagccctcaagcggcccttatgcgggcctgacagagggctcacctcttgccttctaggtcacttctcacaatgtcccttcagcacctgaccctatacccgccggttattcctaagttatattagcaatgcaacaaagagtaatattaaaagctaatgattaataatgtttataataatgattgataattgtccatgatcatctctatacctaatttgtattatgactattcttattctaactattttctttattatactgaaacagtttgtggcttcagtctcttgcctcggcacctgggtaatctttcgcccacaaaaattcagttcctcagttgtactacccaagtgcttaatggtcatgtgatatatggttactaaataggacaatacagaccaagaatatttccatcatcacggaaggttctcatagacagtgctgctgtaggatagttgaggacacggtgccatcttatccctgtggatcctgagaacctgtccagtgctgggtatctgaggacaggtggcagataaccagactcttccttcttagtgactgaccccaccatcctgacacctctcaatttttttttttgagacagggtcttgctctgtcacccaggctgaagtgcagtggtgctatcacagctcactgcagccttatctcctgggctcgagccatcctcttgggagcctcagcctcctgagtagctgggactacaggtgcgtgacaccatacctggctttttttttgttattttttgtagagacagggtctcactgtgttgtccaggctggtctcgaactgggctcaagctatcctcccacttcagcctcccaaagtgctggaattgcaagcatgagccactgtgcctggcctgcctgtcaaccttgacccttgctctgtcttcacagtccccccagtcagtgcccatgtcctatggaccctctctctttgtatctctgctttgtcctttcacttctctctattctagctgcaccatctttgctgcctcctgatctggctatggctcactcctttccatttttcaccctgacccctggatgactttttgaaaggccatatctgtctctgtcactccattcttaaaactctttggtggccgggcatggtagctcacgcctgtaatcctagcactttgagaggctgaggttggtggatcgcttgaggtcaggagttttgagaccagcctggccaacatggtgaaaccctgtcttaaccaaaaaatacaaacattagccaggcatggtggtgggtgcctgtagtcccagctacctgggaggctgatgtgggagaatcatttgtacccaaaaggtggaggttgcagtgagctgagatggtgccactgcattccagcctgggtgacagagcaagactcctcaaaaaacaaacaaaaaaacaaccgatggctggccacggtggctcatgcctataatcccagcactttgggaggccaaggctggaggatcacttgaggtcagttcaagaccagcctgggcaacatggtgaaaccctgtttctactaaaaataaaaaaaaaattagtcaggtatggtggtgtgtgcctgtaaccccaactactccggaggctgaggcaggataatcgcttgaaccttggagttggaggttgcagtgagctgagattgcaccagtacactctagcctgggtgacagagtgagactccgtctcaagaaaaaaaaaaaaaaacaaaaacaaaaccaaaaaactctttggtggcacctgacaggtctcaggatgaatttcttggcctggccacacaaaggccttgtcccttgccactatctacctcccacctcataagactctgaattcgctattcacttcatgatatcctcagccccatgtgcttccctctgggcacttgtctcttgttgtgtcattgctgatttgtctgattgcattccccattagaaatttgctccttaaggactgagactgtccatggcagcattttcagcacttagcatagtgctgggcatcttttgccctgcaaaataatgaacagatcagcaaaggctggtaaatggcacacagtgcacctgcagctccattgctgcccacgtgcctgattgtttagacttacagtagctgggaaatggggagacaaggtgagagccatataaaagtacgtggataattagtatcctgcctttctttccaaacagc

SEQ ID NO: 13 - DNA, 1630 bp, Homo Sapiens
gagctcgagccacgccatgcccgctgcacgtgccagcttgcgcagcacatcagggcgctggtctctccccttcctcctggagtgaaatacaccaaagggcgcggtgggggtggggggtgacgggaggaaggaggtgaagaaacgccaccagatcgtatctcctgtaaagacagccttgactcaaggatgcgttagagcacgtgtcagggccgaccgtgctggcggacttcaccgcagtcggctcccagggagaaagcctggcagagtgaggcgcgaaaccggagggtcggcgaggatgcgggcgaaggaccgagcgtggaggcctcatgcctccggggaaaggaaggggtggtggtgtttgcgcagggggagcgagggggagccggacctaatccctcactcgccccctccccctcccgggccatttcctagaaagctgcatcggtgtggccacgctcagcgcagacacctcgggcggcttgtcagcagatgcaggggcgaggaagcgggtttttcctgcgtggccgctgggcgggggaaccgctgggagccctgcccccggcctgcggcggccctagacgctgcaccgcgtcgccccacgggccccgaagagcccccagaaacacgatggtttctgctcgaggatcacattctatccctccagagaagcaccccccttccttcctaatacccacctctccctccctcttcttcctctgcacacactctgcaggggggggcagaagggacgttgttctggtccctttaatcggggctttcgaaacagcttcgaagttatcaggaacacagacttcagggacatgacctttatctctgggtatgcgaggttgctattttctaaaatcaccccctcccttatttttcacttaagggacctatttctaaattgtctgaggtcaccccatcttcagataatctaccctacattcctggatcttaaatacaagggcaggaggattaggatccgttttgaagaagccaaagttggagggtcgtattttggcgtgctacacctacagaatgagtgaaattagagggcagaaataggagtcggtagttttttgtgggttgcctgtccggggcccctggcatgcaggctggatggagggagaggggtggggggtggcgggggaccgcgtttgaagttgggtcgggccagctgctgttctccttaataacgagaggggaaaaggagggagggagggagagattgaaaggaggaggggaggaccgggaggggaggaaaggggaggaggaaccagagcggggaggcgcggggagagggaggagagctaactgcccagccagcttgcgtcaccgcttcagagcggagaagagcgagcaggggagagcgagaccagttttaaggggaggaccggtgcgagtgaggcagccccgaggctctgctcgcccaccacccaatcctcgcctcccttctgctccaccttctctctctgccctcacctctcccccgaaaaccccctatttagccaaaggaaggaggtcaggggaacgctctcccctccccttccaaaaaacaaaaacagaaaaacccttttccaggccggggaaagcaggagggagaggggccgccgggctggccatggag

SEQ ID NO: 14 - DNA, 3664 bp, Homo Sapiens
gaattcccaattatcatcctgctcccctaccctcaacacctccagcggtaactgtatcttattcatttttgtgtctatgaagcacagtgttgcactttggagatactacatagaagttggcccaaagggtaataaactgtatttgccaagatgatagcatggatttacaataacctctgaaactttataaagaaagatgattgagttaaattgatacacctagcatcacagctgtggaagcttgtggtcttctttatgttaaaggtaaaatggatataatgaattagttgccatttttagatgatatagaagttgaattcctcttaagcctctcaaagagaaagacatattaaaattcattaaaaccagtaccataaactgcacagaacagcctggttccctagagcacttctctggggcagtgagttttcatttaaaaaatgaagtttggattttaaacataagttttaaaagtgattaggctccagcaggagttcttaaattcctacctacaccatgactcccaaatgctctgcctctgttgcctaggaacaaaaattgtcaaggttgagccagatgcaatgtataacaccagatgatagatgcagctcattgtgttaaaaggtgttaaacacttaagtgcatgtgatatactctatatcacaagggtaaggaagttccattccatatcctgatttgggtcttctaatacatacttgtagtggatgtggtaatcagtctttgttctatgtcccattaggatcaatgcaaccagaaatccttaaaatggatttttattatgtctagctctgttttactgttctatttgtttattttaaaaagattttagaatggtgtttaggttgggctggtggctcacgcctgtaatctcagcactttgggaggccaaggcaggaggattgctggagcctaggagttggagaccagctagggcaacataaggagacattgtctccgcaaacaaacagaaaaaaaaaaagtaagaaagaaagagagaaagaaggaaagaacaagaaaaaggaaaaaaaaattaactgcagtaagtgcagaaatctctctcaaggatatgatggatggcaatgaagacagagtttttgacactggattatttaaagcataatttaagcctctttctctcccctcatagaattgtgaatttttgtgttttaattatatttaagccaggcgtggtggcgagtgcctgtagtcgcagctgcgctggaggctgaggccgattgcttgagcccaggatttggaggccagcatgcgcaacataatgagacccagtctctaaatgcatgcctctctctatatatttaaaattctgatgtgaaaatattttaaaatttaatacatttcaaatgtttttaattgtataataaacaaaatgtaaataataaaataatttaatattaaattcaaaaatgaggtagaaacaaagcacagcgatataaataataaattttcctttacatttttgaggcggtcttttgagttttccatttccttcttaaggtcactgaaatgtgctccttggagccagcccgcaaatcacgcatttagaaaaacataactatacactcctaaccctaagtattagaagtgaaagtaatggaatctcgatgtaaacacaatatcacttttttgatgagctattttgagtataataaatttgaactgtgccaatgctgggagaaaaaatttaaaagaagaacggagcgaacagtagcttcctgctccgctgactagaaacagtaggacgacactctcccgactggaggagagcgcttgcgctcgcactcagttggcgcccgccctcctgctttttctctagccgccctttcctctttctttcgcgctctagccacccgggaaggcctgcccagcgtagctgggctctgattggctgctttgaaagtctacgggctacccgattggtgaatccggggccctttagcgcggtgagtttgaaactgctcgcacttggcttcaaagctggctcttggaaattgagcggagagcgacgcggttgttgtagctgccgctgcggccgccgcggaataataagccgggtacagtggctggggtcagggtcgtgtctaggggacggccgagggcctcggagggcgagtattgaggaacggggtcctctaagaaggccggactggaggtcagggatctgcgcggggcccggctgggcctcggggggcggtgggcagggccttcgcctgggtctggccgtgtgagccacactgggctggctttagagggaggctatgggagcccagcctggcggggttaggcggcgtgggggtgggggttcggggctgcagtcatgagtcgaggtcggctgttctcaggaactgcctgaagaggctttcgggtcttgattgaagcaaaatccgctcccccacgctgagcgcctgcggagtagcaggctctttcctgggcccggcccctgcgcgccctgccatcccgcctcgggggtgggaaagtgggaccgcacctgggccaggtacaggcgcgggtccctagagccaggccgccctgagaaaccgatcctggaactcgtgggccttcttgggcttgctctgcccacggccccggcccacctggagctgttaagaacagtcagcccaggcacttaactctcatgagcagtgtagtgcagtttttttcatttaaaaagatacatctctgcttctttctggattgatttttctttgaagatgaatgtgagaaatagaacttaaaggtctattctgagtgtgctttataaatgattttatcatcagtgatgggtgttagaaaaatctaggtaattatgcctggagttctgacgtttcattggcaaacttcagaggaagtcttgaacttctggttgtcagcttttttttttaacccattcattgtgattcaagtataccgtttttctgcttagtccttgacattgtttaggttataattagaattttatctgtggaattgcacttttcattcttttgttttacggtgcttaagtgatatttcctactcttggaaaaagtaccttgaaagtcttgagcatgtttgtctgtgacctcagcaagcagaggaaaaagattaaaattgtcacgtgggcaactgtaaacacttaaaatgtttttgtcgttttaaacaaaattttcctaatgaacagtctgaacacattttagttctgtcctcataactttaaaaaataatgttttgaataaaattaggagtatcataaagcggtataaatttgttgaaatatttgggtataactttggcacacgcaggtactactttaaagtgtcacaaaaagggaacataattctggtttttgtttggaaagaatagacaagttgatacctgaatttgagggttattttgattggaagaagctaaatactacactagtatagaatatacacgtttccaatgtctcaggagtcaagaaggatggaaagttattgtaggagtccttacccttgtaaatattgtttgaatgtaattaatatttatggaatacttatgctgcagtaggcactgtggaaaatgctttacatatagtgtttcattaatgcttaaaactactcgagttagtggcatgtaattaagtcagtttttccttcactttagg

SEQ ID NO: 15 - DNA, 6621 bp, Homo Sapiens
tttgtatttttagtagagatggggctttcttttcttttttttttttttttttgagagggagtctcgcactgtcacccaggctggagtgcagtagtgccatctccactcacttcaaccaccgcttcccaggttcaagcaattctcttgcctcagcctcccaagtagctgggattacaggtgcccaccaccacgcaccactaattttttgtatttttagtagagatggggtttcactatgttagccaggctggtcttgaactcctgacctcatgatccacccatctcggtttcccaaagtgctgggattacaggcgtgagccaccatgcccggccaagatggtgtttcaccgtgttggccaggctggttttgaactcctgacctcggcctcccaaagtgccgggattacaggtgtgagtcactgtgcccggccaggagttttactgtgaagggaaggaatgaatatagttggaggggaaagtggcatcaaggaaaggctttttatcactaataataaacatttcattgaaatacaccattcatacagaacagctaacaaatcttgagtgtgtagctcaatgaatttccacaaggtgaacacactcaggtaaccagcacccagatcaagaaatggaaagtggccaggtgcagtggctcatgcatataatgctaacactttgggagtccaagacgggaggatcgcttgagctcgagagtttgagaccagcctgggcatcatagttagactcccgtctctaaaattatacatatatttttttctgagacagagtcttgctctgttgcccaggctggagtgcaatggcatgatctcagttcactgtaacctccgcctcctgggttcaagtgattctactgcctcagtctcccaagtagctgggattacaggcgtgtgccaccacacccggctaattttttgtatttttagtagagacggagttttgccatgttggccacactggtctcgaactcctgacctcatgatccacccacctcggtttcccaaggtgctgggattacaggcgtgagccaccatgcccagccaaaataaaaaataaaatttttaattagctaggtttatgggtgcatgcctgtagttcaggctactcaggaagctgaggtgggaggatcacttgaacccagaagttcgaggctatagtgagccatgatcatgtcactgcactccaacctgggccacagagcaagactctgtctcaaaaagtgaaaaataaataagaaacagaatatgaccagttgccaatatccccttcatggccccttgcagtcaccaccatctttctgaaaggtaactagtaccataactaactttttttttttttgagacggagtctcgccctgtcacccaggctggagtgcagtggctcaatctcggttcactgcaacctccacctcctgggttcaagcaattctcatgcctcagcctccatagtagctgggattacagttgtgcaccaccatacatggctaatttttgtgtatgtatatatgtgtgtatatatatgtttgtgtatattacatgtgtgtatatatgtatattacatatgtgtgtatatatgtatatatacatatatatgtatatgtatatatacatatatatgtatatgtatatatacatatatatgtatatgtatgtacacatatatatgtatattatgtatatatacacatgtatgtatattatgtatatatacacacatatatgtgtgtgtgtgtatatatatatatatttttttttagtagagatgaggtttcactatgttggccaggctggtctcgaactcctggcctcaagtgattcgcctgcctcagcctcccaaagtgctgggattacaggtgtgagccagacctaaacagcatgtctcttttgtgtcttccttcttatgtttgacagttgatgtgagattcactcctactgtgggtagcgcttctgtccttttcatcactgtataaaataactttgttctatttacccattttattgttgatgggcattagggttgctttctgtttggagctaaaatgattaacatggccatgaatatttgtgtacatgcattttggcacacttgaactgtattgtagcttctgtgccaacttttcccttcccatggccttctgtggccacctcctcgccttcctacatgatttccatagttgcctgtgacctcattctggccaccttcagtgactctcctgggtgcacctctgaactatggactcggctactcccttgtggtttctatctcagccccagctttgcggtcctgtctcactacatcaagtcctcaatgctggtgctccccagatccagggtcctaaaaaccctttgtacatcctcaatgggcattaccatcttcatgctaatcaacaccaaatctgcctcctgactacaccccccagccagtccaccagcacaaaactgagctcatcaaattcctccaagaagtatgcctccaattgttgaaatgttacatccacccaggtacttgaatcattacctaagaatcattctagcctcctcccttccctctagccccctacaatcttaactctcaattatcaaaatctgatgagatctacctccttcagggctcacagaatcattcccttcctttgtctccaaggcccccaccttgcttcagaatctcccagacttttgagacagccacctcctttttcctcaggcctccccactctcctccactgatccaccctaaagcaaatctgatccggttatcacacaccctccactgtccacaggataaggccaaactcttcagcaaactccaatcctttcaagaactgtccctcacagccagtcccatgtgcccattctagaaccgactggatcaactcaggagtagctcccggcaagtacggcgttcctcctcacctcctggctgccgagggccgtttccttagaaagcacttcccaccagccccaagctccccttctccagcaaccttgacctttagttttaatctcctttaggacgtgccccccaccgtactgccttccccagtccccgcccctcctctaggtgcccaccatccctccacaaaccacagctattgtcatggtaataattccattattagaaggagctttatgctcagcggaccagagctccctgagagcagggattgtggtattatttcaagcactgaatttgttctagtaatccttaaataaacatatgttgaatgaatgaatgcagtaacaggaatgttgagccaagttttgtttttgttttttgagacggagtctcgctctgttgcccaggctggagtgcagtggctcggtcttggctcactgcaagctccgcctcccgagttcagccattcttctgcctcagcctcccgagtagctgggactacaggcgcccgccaccacgcccggtaattttttgtatttttagtagagccgggtttcaccatgttagccaggatggtctcgatctcctgaccccgtgatccgcccgcctcggtctcccaaagtgctgggattacaggcgtgagccaccgctcccggcctgttgagccaagtattaaaccacataaaacacaggaggagaggaaagtattcagagatacgacagggagaactatttgaaacagtgggaccacagaccatgtgaactgtgcagagaggcctaaatagcctggggtttctggagggaagggaggttcctgggtggtggagcactggtgcacagaaaaggagatgaatcctgagagagaggttcctcactgtgaagggtctggtgttggggccaaaggtttggggtttccacctgtccagcatggcttttcaaactgtagggttttttttttttgagtggggggcagggggtgtctcactttgttgcccaggctggtctcaaattcgtgggctcaggcaatcctcccacctcgccctcccaaagtgctgggatgataggcgtgagccactaagcccagcagtaggttgcaattaaatcatgcacttatggccctcaaaatccgtctaggagctgccacaggttcggcgctgtaaaagtaaatatgcccacttagaaaatggggataattcctatgtcacagagttgtaaagattaaatgaattaatacagattaacacactgggaacagtgtcaagtgcataagcattatgtaaactttagctattatttgctattattgtgtttgctgttatttctctctaggagctcccagggggctaagaagtggtgggaaagaaagaaatgattctaagagcatccaataagggctagaatggaagtgagcaaaaaatgctgaggcccacagcacaggttgtactgcggggttcaaatcccatgaggccagcagcacccagggtctgtgagccctccagagttgggccctggtggtcgagtccagtcctgggggtcattgcattccctccctcattataaaatggggcctggaggcccggggcggaagaaaggggtccacaatactgcacggttagaggccgagccaaggctggatccggccagacctccacaggtcttccttagcctccacattgcctcagagtgtggggcgcccggctgggggcgaggtagcggaggcccaaagggggccgaagctaactggacggcagctcgcgatgggaactacgcttcccagcatgcgacggggcaaaggggcctttcagccgcgagcagcgcctcgcaggttctgctgggagttttcattgacctctgctccccctctcattttgatccccgctcttctgctctgggctccgcccccttctgagagccgatgacctggcagagtcccgcgagccgctttcttcttcccctctcattggcccagcctagctgccattcggttgagaggaggagaagttgcttactgattggtggattccgtttggcgccaactaggaaaggggggcggggcagcagctggccccactgagccgctattaccgcgaaaggccggcctggctgcgacagcctgggtaagaggtgtaggtcggcttggttttctgctacccggagctgggcaagcgggtgggagaacagcgaagacagcgtgagcctgggccgttgcctcgaggctctcgcccggcttctcttgccgacccgccacgtttgtttggatttaatcttcaggttgccggcgcccgcccgcccgctggcctcgcggtgtgagagggaagcacccgtgcctgtggctggtggctggcgcctggagggtccgcacacccgcccggccgcgccgcttgcccgcggcagccgcgtccctgaaccgcggagtcgtgtttgtgtttgacccgcgggcgccggtggcgcgcggccgaggccggtgtcggcggggcggggcggtcgcggcggaggcagaggaagagggagcgggagctctgcgaggccgggcgccgccatggaactgggcccggagcccccgcaccgccgccgcatgctcttcgcctgcagcccccctcccgcgtcgcagcccgtcgtgaaggcgctatttggcgcttcagccgccgggggactgtcgcctgtcaccaacctgaccgtcactatggaccagctgcagggtctgggcaggtaaggagagaccggcgggcggtgctccgggcccctggcctcggtgtcggcctcggagagatcaggccaggaaacggaccgggagaagggcgagacccgtccgtccgggttcgccgctcggggacagccgggctagggcctgccatgtgcacccccgcccgggcggaatgttgggcgggagaggccgtcgggaccttccaggggaagaggtggagatccttgggcctaagcccgagccaggcccaccttcacccctttcggattgctccgtactctccttctatctctatccctggaagctctttggaatctacccccgcggggaaaatcaggctcttctaggcactcactttcaccctttgctaaaccatcctcaggatcttcgtttgctgtgatctttgttccttctcaacaaaggaccatggcattttctttcctggcgtttatgtaaaatcatctcagtccctcgccctgtgcacattcctgatgtccactctgctgctttcctaaggccaggtctttttacccaactttcagaaagcttcctgggcttttcctgatagcaaaaaatgcatcccacggtgtttcccgcggaagagctactttcccttcaatctctggcatcccgtttgctaagcacatgtcttgtgcgtttcccaacttctgaaaagcagaaagtgtcctgttcaactttcatcccgactctgtctcagtacttagaacacatgcttttattttaggaaataccccaacatttgccatagccatcataacctgcaatgtggtccaaggccatgcccacccactccttttttctcctttgcccaagtgctaattgggtgttcagagtggcaaagtgggatctttgccacttgtggtgtggcctagaaatggtttctggcagcctggctgcttcttaatctcatggcctatctcctgcatgtgaccttttaattatatcctataaatcattcatggtttatttctgttggtttcagt

SEQ ID NO: 16 - DNA, 2976 bp, Homo Sapiens
gaggctgaggcaggtggatcatctgaggacaggagttcaagaccagcctggccaacatgatgaaaccctgtctctactaaaaatacaaaaattagccagtcgtggtggcgcatgcctgtaatcccagctactcaggaggctgatagaggagaaccgcttgaacccaagaggcgaaggttgcagtgagccaagaacacaccattgcactccagcctgggcgacagagcaggactccgtctcaaaaaaaaaagagctggtcagtgtcaaatgcttagcacagagactggcacagtaatcttcaatgtccagcacctattgttactattttttttttttttttttttttgagacagagtcttgctctgtcgcccaggctggagtacagtggcgcgatctcggctcactgcaagctccacctcccaggttcatgccattctcctgcctcagcctcccgagtagctgggactacaggcgcccaccaccacgcctggctaattttttgtatttttagtagagacggggtttcactgcgttagccaggatggtctcaatctcctgacctcgtgatctgcccgcctcggcctcccaaagtgctgggattacaggcgtgagccaccatgcctggccctattgttactatttttacccctcacttctgtacagagcatttatggctcaagaaacatttgtcattttaattgtatgggagtcccacaacagcatagggagacatttctgatcattattcccattaggagggtggagaaactgaggctttgggaggtggtcctgacctagggaatcaatttgctgactcactaacccatgaagctctacagttaaaaaagactagattaaaaaatgagaactcagtaaaggggctgaggcaggaggatcgcctgagttcagaaatttgagatcagcctcggcaacatagtgagatcccctctctagaaaaattttttaaaaaattaggccgctcgaggcagagtgcagtggctcacgcctgtaatccaacacttcaggaggctgaagagggtggatcacctgaggtcaggagttccagaccagcctggccaacatggtgaaaccccgtctgtactaaaaatacaaaattagccggtgtggtggcacacgcctgtagtcccagctactcaataggctgagacaggagagtctcttgaacccggcaggcggaggttgcagtgagccgagatcgtgccactgcactccagcctgggcaagacagagcgagactccgtctcaaaaaatacaaacaaaacaaacaaacaaaaaattaggctgctagctcagtggctcatggctcacacctgaaatcctagcactttgggaggccaaggcaggaggatcgcttcagcccaggagttcgagaccaggctgggcaatacagggagacacagcgcccccactgcccctgtccgccccgacttgtctctctacaaaaaggcaaaagaaaaaaaaattagcctggcgtggtggtgtgcacctgtactcccagctactagagaggctggggccagaggaccgcttgagcccaggagttcgaggctgcagtgagctgtgatcgcaccactgcactccagcttgggtgaaagagtgagaccccatctccaaaacgaacaaacaaaaaatcccaaaaaacaaaagaactcagccaagtgtaaaagccctttctgatcccaggtcttagtgagccaccggcggggctgggattcgaacccagtggaatcagaaccgtgcaggtcccataacccacctagaccctagcaactccaggctagagggtcaccgcgtctatgcgaggccgggtgggcgggccgtcagctccgccctggggaggggtccgcgctgctgattggctgtggccggcaggtgaaccctcagccaatcagcggtacggggggcggtgcctccggggctcacctggctgcagccacgcaccccctctcagtggcgtcggaactgcaaagcacctgtgagcttgcggaagtcagttcagactccagcccgctccagcccggcccgacccgaccgcacccggcgcctgccctcgctcggcgtccccggccagccatgggcccttggagccgcagcctctcggcgctgctgctgctgctgcaggtaccccggatcccctgacttgcgagggacgcattcgggccgcaagctccgcgccccagccctgcgccccttcctctcccgtcgtcaccgcttcccttcttccaagaaagttcgggtcctgaggagcggagcggcctggaagcctcgcgcgctccggaccccccagtgatgggagtggggggtgggtggtgaggggcgagcgcggctttcctgccccctccagcgcagaccgaggcgggggcgtctggccgcggagtccgcggggtgggctcgcgcgggcggtgggggcgtgaagcggggtgtagggggtggggtgtggagaaggggtgccctggtgcaagtcgagggggagccaggagtcgtggggacgatcttcgagggaaggagaggggcatccgtagaaataaaggcacctgccatgccaagaaaggtcgtaaataggagtgagggtcccggggataagaaagtgaggtcggaggaggtgggagcgcccctcgctctgaggagtggtgcattcccggtctaaggaaagtggggtactggagaataaagacatctccaataaaatgagaaaggagactgaaagggaacggtgggctaggtcttgagggggtgactcggcggccccctcccgggagttcctgggggctcggcggccgtaggtttcggggtgggggagggtgacgtcgctgcccgcccgtcccggggctgcgggctggggtcctcccccaatcccgacgccgggagcgagggaggggcggcgctgttggtttcggtgagcaggagggaaccctccgagtcacccggttccatctacctttcccccaccccagg

SEQ ID NO: 17 - DNA, 2310 bp, Homo Sapiens
taaggggtgggacctggatttgaacccaggtggggccggccttaagggcccatgctaggcctgagagagcaagacccccaccctcgcaacgcaagcaatccatggcttagccacaggcctggcggggaggaggacggatagattaccaggttagccctggaaggtcaaagaatctgtcatttaaaactccaggctgggccccgtttctcacgcctgtaatcccagcactttaggaggccaagggaagcggatcacttgaggtcgggagttcgagaccagcctggccaatatagcgaaatcccgtctctactaaaaatacaaaaattagcctggtgtggtagtgggcgcctgtagtcccagctactcgggaggctgaggcaggagagtcgcttgaacctgggaggcggaggttgcagtgagcagagatgacgccaccgtactggacgacagtgagactccatctcaaaaaaacaaacaaaacaaaaaaacctctccagtctccagtccgttcctcaaacccctaaatctgagctggggacggggagggagaaggaccaggaggtggcatccagggcttctcaaggcagcagcagaaggtgaaggaggagtgaggggacaggtgagagagactgaccgggaaagctcagctccgtggggaagggcttgtggggtagtgattgagactcaggaccgttttcatggccagagcccacttgtgtgcagcaagaggaaagcacttcgtgtctaacgtagtggaatgagagtaacgtagaagaacaacgaatcccaggtctggcgtttatctcctaggaagggtgtgggagagctgttttccaagggagactctctggaggctgctttgcgcagcaagcagtttttacccagattatatacagtatttcagaccaatttcaaaacctctgcgttttaaaaattgtctttatttacattttacagaaagttgagaaagtgttatttatatggggggtaggggtgctggagattatgagactaataacaaccctcttagctcgcaccctttggcaccactacagcttccaaactctgggactttctcgactagcttccctttgtttagctgtgaaatggaagaagcggtccgggtgtggcggctcatgcctgtaacctgagcactctgggaggcggaggatcgcttgagtccagaagttcaagaccagcttgggcaacatagggtgaccctccaccctccccccgccccaccacatcgctacaaaaaatttttaaaaattagccgggtgtggtggcgcaagcctgtagtctcagcgggagctgagggaggagaatcgcttcagcccgggaggtcgaggctgtagtgagccgagatcgcgctactgcactcctgggcgacagagcgagaccctgtctccaaaaaaaaaaaaaaaagaaaaaagaggaagttgtatccaattcagaaacgcggtccttcgggacctgctagttttataccccggaggatcctccccggcgggctggcacgggaggtggagaaagaggcttgggcggccccgctgtagccgcgtgtgggaggacgcacgggcctgcttcaaagctttgggataacagcgcctccgggggataatgaatgcggagcctccgttttcagtcgacttcagatgtgtctccacttttttccgctgtagccgcaaggcaaggaaacatttctcttcccgtactgaggaggctgaggagtgcactgggtgttcttttctcctctaacccagaactgcgagacagaggctgagtccctgtaaagaacagctccagaaaagccaggagagcgcaggagggcatccgggaggccaggaggggttcgctggggcctcaaccgcacccacatcggtcccacctgcgagggggcgggacctcgtggcgctggaccaatcagcacccacctgcgctcacctggcctcctcccgctggctcccgggggctgcggtgctcaaaggggcaagagctgagcggaacaccggcccgccgtcgcggcagctgcttcacccctctctctgcagccatggggctccctcgtggacctctcgcgtctctcctccttctccaggtactccacagcctcgccgtggccccgaccgggaccgctccctggggggcgggcggggtccgcatggggcagtggcgtcggggagagcgcggggctgcgctccctggggccaagggagtcccggaaggcccgtgaggaccctgcggtgtggggagtgcagggccgggcacgcctggacccagcctccttcactctctgccctcgggcgcagg

SEQ ID NO: 18 - DNA, 4233 bp, Homo Sapiens
  unsure (2320, 2321, 2336, 2351, 2363, 2413, 2723..2726, 3730): unknown base
ccctcctcccagtcgaagcacctcctgtccgcccctcagcgcatgggtggcggtcacgtgcccagaacgtccggcgttcgccccgccctcccagtttccgcgcgcctctttggcagctggtcacatggtgagggtgggggtgagggggcctctctagcttgcggcctgtgtctatggtcgggccctctgcgtccagctgctccggaccgagctcgggtgtatggggccgtaggaaccggctccggggccccgataacgggccgcccccacagcaccccgggctggcgtgaggtaagtgcagtcccttcccaggaatgagaaccagtgcccgcccccctcacagctttccacgcgttcgtttcgcgagctggttatggaagggtcgctcaagggcgggaagtggggcctttgtggtcatgggaaagtataattttagggactgaggtgtaggatcttcgatgcaaggcatgtgtcatgtgtgatctttgtgcggggcgcgattgtcccaaaggaaaaagcgttttctattgcagggcctcacgtggctggaggggttggtattgagtcattgtgttatctctggggccggccccaaggaagactgggagcgggggatgggatgctggtggtgttctttgcgctttttttttgggagtccctttgttgctgcaggtcataccatcctaactctgtaagcgacttttggtgataggagtctgtgattgtagggtctcccttgatctgagaatggctacctctcgatatgagccagtggctgaaattggtgtcggtgcctatgggacagtgtacaaggcccgtgatccccacagtggccactttgtggccctcaagagtgtgagagtccccaatggaggaggaggtggaggaggccttcccatcagcacagttcgtgaggtggctttactgaggcgactggaggcttttgagcatcccaatgttgtccggtgagaaggtggtggagggttgggcgtggggagtaaagggaaaagacagcctataggtggggtgtgatgatctgtagagaagtggggaccctgaggaaataatgagaggccatgttgggttaaaggggattgaaaagtgagcatttactctggtcaggctgatggacgtctgtgccacatcccgaactgaccgggagatcaaggtaaccctggtgtttgagcatgtagaccaggacctaaggacatatctggacaaggcacccccaccaggcttgccagccgaaacgatcaaggtgagtggggttggtaggcattgagaggtggattgggacctttgtagtagaaccttctgggatttcaggtatggtgcctagtttccagtgcatctgtacctccccctttgaaactaggatctgatgcgccagtttctaagaggcctagatttccttcatgccaattgcatcgttcaccgagatctgaagccagagaacattctggtgacaagtggtggaacagtcaagctggctgactttggcctggccagaatctacagctaccagatggcacttacacccgtggtcagtagaaagatggtaccaaaatgggttctggttgggaataggagagtgattgcccgtagcaattgagaagtcatgtgcttcatgtgttcagtcaagcaagttgtgtttcatggtaacccatggggtccccatccattcttcctattccctttaggttgttacactctggtaccgagctcccgaagttcttctgcagtccacatatgcaacacctgtggacatgtggagtgttggctgtatctttgcagagatgtttcgtcgaaagtatgggacccacataccctggactaccttgaattccccaaatcgcttgttcataaaccacatccataccttgcccattctttttttttgagaccagggcttgctgtgttgcccaggctggattgcaatggcatgatcacagctcactgcagcttcaacctcctgggctcaagtgatcctcccatctcagcttcccaactagctgacactacaggcacgcacctccatgcttggctagtttgttaatatttttatagagatggggtctcagtatattgcccaggctggtcttgaactcttgcactcaagcaatcctcccacccctacctcccaaagtagcataagctactgcatctggccccattcttttacttgcgtactactaacttgcccatagcagaaagctctgaaatgttctggaattaggaacttcatatccctttattctctttattttttatttatttatttatttatttatttatttattgagataaggtttcactctgnnacccaggctggagtncagtggcccaattanagctcactgtancctctacctcctgggctaaagmaatcctcccatctcagccccttgagtanctgagactaaaggtgcacgccaccatgactggctttttttttttttagatggagtcttgctctgtcgccaggctggagtgcagtagtgcgatctctgctcactgcaacctccacctcccagattcaagcaattctcttgactcagcctcccaagtagctgggaccacaggtgcacgccaccatgctcagctaatttttgtacttttagtaatgacaggtttcaccatgttggccaggatggtctcgatctcttgacctcatgatccacccacatcagactcccaaagtgctaggattacaggcgtgagcnnnngcacctggcatttctttttttttaaaaaaagagacaaggtcttgcttgcccaggctgatctagaactcctgggctcaagcagtcctctcacctcagcatcccaaagtgctggaattgttggcctttattccctatacttcctattttgagccactaagcagtaaccattcaactaagatatctttgaaaatgactgctaccttatatcccttctcaccttaggcctctcttctgtggaaactctgaagccgaccagttgggcaaaatctttgagtaagtgaccaacatgggagaaaaagattttctattctgagtcctctttctgctgaacccaggatggcaactggctctgccatggggatgggaactggaggaccctcctgaccagagttctcctgtcccccacagcctgattgggctgcctccagaggatgactggcctcgagatgtatccctgccccgtggagcctttccccccagagggccccgcccagtgcagtcggtggtacctgagatggaggagtcgggagcacagctgctgctggtaactggagatggctgtgggcacagggaaagaaatagagactggggaaagaaatagagcagtatgcagggccctggccactgtggttaatgaaacttggttggtagatggtctgtagtttttattacagctgcaaatagccacccacagagaaggatatagaagagaacccatcctggctgggcacggtggctcacgcctgtaatcccagcactttgggaggccaaggtgggcgtatcacctgaggtcaggagttcgagaccagcctggccaacatggtgaaacctcgtctctactaaaagtacaaaaataagccgggggtggtggcacacgcctgtaatctcagctacttgggaggctgagataggagaatcacttcaactcaggaggcggaggttgcagtgagctgagatcataccattggcactccagcctgggtgatagagcgagactccgtctncaaaaaaaaaaaaaaagaaaaaagaagaaagctcatcccaggtattgttgtgggtggcagaagctgttttcttcatggttttctgacctttgcctctcccctcaggaaatgctgacttttaacccacacaagcgaatctctgcctttcgagctctgcagcactcttatctacataaggatgaaggtaatccggagtgagcaatggagtggctgccatggaaggaagaaaagctgccatttcccttctggacactgagagggcaatctttgcctttatctctgaggctatggagggtcctcctccatctttctacagagattactttgctgccttaatgacattcccctcccacctctccttttgaggcttctccttctccttcccatttctctacactaaggggtatgttccctcttgtccctttccctacctttatatttggggtccttttttatacaggaaaaacaaaaccaaaagaaawaatggcccttttttttttttt

SEQ ID NO: 19 - DNA, 7369 bp, Homo Sapiens
cagaagtcctcccttagagtgtgtctgggtacacattcaagtgcatggttgcaaacttttttttttaaagcactgaatagtactagacacttagtaggtacttaagaaatattgaatgtcgtggtggtggtgagctagaagttataaaaaaaattctttcccaaaaacaacaacaaaaagaattatttcattgtgaagctcagtaccacaaaaatttaaataattcattacaagcctttattaaaaaaaattttctccccaaagtaaacagacagacaatgtctagtctatttgaaatgcctgaaagcagaggggcttcaaggcagtgggagaaggtgcctgtcctctgctggacatttgacaaccagccctttggatggtttggatgtataggagcgaaggtgcagacagcagtggggcttagagtggggtcctgaggctgtgccgtggcctttctggggtttagccacaatcctggcctgactccagggcgaggcaggccaagggggtctgctactgtgtcctcccacccctacctgggctcccatccccacagcagaggagaaagaagcctgtcctccccgaggtcagctgcgttagaggaagaagactgggcatgtctgggcagagatttccagactctgagcagcctgagatgtcagtaattgtagctgctccaagcctgggttctgttttttagtgggatttctgttcagatgaacaatccatcctctgcaattttttaaaagcaaaactgcaaatgtttcaggcacagaaaggaggcaaaggtgaagtccaggggaggtcaggggtgtgaggtagatgggagcggatagacacatcactcatttctgtgtctgtcagaagaaccagtagacacttccagaattgtcctttatttatgtcatctccataaaccatctgcaaatgagggttatttggcatttttgtcattttggagccacagaaataaaggatgacaagcagagagccccgggcaggaggcaaaagtcctgtgttccaactatagtcatttctttgctgcatgatctgagttaggtcaccagacttctctgagccccagtttccccagcagtgtatacgggctatgtggggagtattcaggagacagacaactcactcgtcaaatcctccccttcctggccaacaaagctgctgcaaccacagggatttcttctgttcaggtgagtgtagggtgtagggagattggttcaatgtccaattcttctgtttccctggagatcaggttgcccttttttggtagtctctccaattccctccttcccggaagcatgtgacaatcaacaactttgtatacttaagttcagtggacctcaatttcctcatctgtgaaataaacgggactgaaaaatcattctggcctcaagatgctttgttggggtgtctaggtgctccaggtgcttctgggagaggtgacctagtgagggatcagtgggaatagaggtgatattgtggggcttttctggaaattgcagagaggtgcatcgtttttataatttatgaatttttatgtattaatgtcatcctcctgatcttttcagctgcattgggtaaatccttgcctgccagagtgggtcagcggtgagccagaaagggggctcattctaacagtgctgtgtcctcctggagagtgccaactcattctccaagtaaaaaaagccagatttgtggctcacttcgtggggaaatgtgtccagcgcaccaacgcaggcgagggactgggggaggagggaagtgccctcctgcagcacgcgaggttccgggaccggctggcctgctggaactcggccaggctcagctggctcggcgctgggcagccaggagcctgggccccggggagggcggtcccgggcggcgcggtgggccgagcgcgggtcccgcctccttgaggcgggcccgggcggggcggttgtatatcagggccgcgctgagctgcgccagctgaggtgtgagcagctgccgaagtcagttccttgtggagccggagctgggcgcggattcgccgaggcaccgaggcactcagaggaggtgagagagcggcggcagacaacaggggaccccgggccggcggcccagagccgagccaagcgtgcccgcgtgtgtccctgcgtgtccgcgaggatgcgtgttcgcgggtgtgtgctgcgttcacaggtgtttctgcggcaggtgaatgacgggcgtgggtcggtgcgcgctcggcttgcgcacacggtgtctctaagtgcgcgggtgacgagagtcgggatgtgccggagaccccggggcggagagcgggattacaagtacaggaatccctggtcacgctccccgcccctggaaacccagctggggcgagggagggcgtggacgggaccgttctgggagctcgcctttggctgcggttggctccaggccccaggcgcagtttgctcgcggcgtggggatgaagtccgtgtccctggaggggcccaggaagggcgaggaaagcggagtggagtaagttcgtctaggatcggtcccgggtggctctgggatccaatctgcgccgccctggcccaggtcccaggttcaggtcctttacgccactgtgtccaccacctggctgagcgctgaggtcagcgcgggctgtttcctggcccttgggaatgtgccaggacccgtcccctaaggactagcgaggaggtgactcactgtgacaaggagaccccagggaacggactgtatgaggtcagaaccccgcccgggatggggtacagcgggactccagaagccctctcccctgccccttcgcggtctccgtcctcccatcggcacagtgacctatttggctggaacagtttgttcccaaggaagccgggcactggaggtccgggacaccgcgtcgggtccccgctccgcggcgcgctgtaggggtcggggagtcacggccctgctctgggcgggctctaaccagcctgtcagtcggggaagggcaagggtctcctctacctctttcccaccgcggccgggagaatcgcggcccagcctgtcctcgggtcggggcgctggactccggggcgggagcggagcccacgcctggatgggaggcggggagggttcatgtctttgaggggtggggggtctggggggcacgacgctgctcagggcctctatcagctgcctcgggggctcagggcttcccgacctagcccagattccctctccgaaagctacagggctgagcggagcaggggggcgagtcgccccctggggcgccgccgcctggcgcggaccacagcgcgtcctctccgtcccaaacccctgggggacacttgcgccctcttcgtgaggaaaagcatcttggagctgggttaggaacttggggcgcccaggcagcttcccctctccttgcctccctccacgtcgcgtttctgggaggacttgcgagcggttttgttttcgttgctcccgtctatttttattttccagggatctgactcatcccgtgctttgggcgtggagataaggtggaggggccggctcccggcgcgcgcgcgcgtgcgtgtctgcgcgggcgtgtgtgtgtgtgtgtgtgtgtgtgtgtgtgtgtgtgtctgtgtcagagacggcacaagagcgcgcggtttcccaacagcggcgggagtttcggaagcctggccggctcagcgtgacgtgttcgcggccccccggtcccctcccattctccccctccccaccccagggtgacgcgcagccggagtggaagcagttttggcgggcgagcagcgccttgcaggaaactgactcatcactactccctccagcggtccgaggctctgcccacgcacctcccactccgcgcgtgatttcctggaggccggcgccccctcccggccctggcgggaatagcacacaggctttcccgcggagtggggctggccggcgcgaaccgccgcggctactcctgggctcatccgagatcaacccctatgccattaccaccccttcaaaggagcactccttaggttcaacagtattcactgagctcttactggaaattaaaatatggctgaagtctaaggcaggaaggccaataaaggaggctatttttaattgtttctaaaacaagggtttgcgtttctgagttttctttgggctgaaagttattatgagcatgagagcagattttgatgggggaggagaggcctatgagagccataagagaaggaggggtggtagaagaggagagggtgcctgcctagatcctagtcctgtcttgaactcccgagagccagggaatatccagcaccttgatgaagccctaggcgggcgcctcctccttgtgcctatgatgtattgagacccagaatgtccatttcaaacataccagtgtgtctccgcttggctggcaacccaagagtgcccatctgaggaattgtgccaaacacttgcttgaatcttcaatctggattaagttggtctcgggaggcagggcctcagcaatctatattttgaaaaaactccctaggtgcttttctttctttctttttttctttctttctttctttctttctttctttctttctttctttctttctttctttttctttctttctttctttttctttcttttctttctttctttctttctttctttctttctttctttctttcttcctttctctttctctctttctttctctttctctctttctttcttttctttcgacagagttgcactctgtcacccaggctggagtgcaatggcaccatcctggactcaagtagtcctcctgtttcagcctcccaagtaaccgggaccacaggcgtgatccccccgcccccatgcccagatttttttttttttttttttttttttgagatgcggtctcgctctgtcacccaggctggagtgcagtggcgtgatctcggctcactgcaagctccgcctcccgggttcacgccattctcctgcctcagcctcccgagtagctgggactacaggtgctgccatcatgcccggctaatttttttttgtatttttagtagagacggggtttcaccgtgttagccaggatggtctcaatctcctgacctcgtgctccgccctcctcggcctcccaaagtgctgggattacaggtgtgagacactgcacccaaccacccagctaatttttatttatttttatttttagtagagacagggtctcagctagttgcccaggctagtcttggacccttgggctcaaatgattctcccacctctgcctcccagagtattaggattacaggcataagccactgcccctggcctccccaagtgattgtgatgggcctctctggttaagaaacctcaaaattagagagggagtggggttcaatactacagcacaggactcagggcaaacaggcctgggttcagatcctggctgtgccacttatgaactgtgtgatgttaggcaagttacttaacttatctgagccttggttgcctcttctgtaaaaagggagctaatagatatccactttttaggaggattgatatttttaaactgcttagaacagcccccaaacataaaaatatataaataaatcccaactcatgcctagcagagggtggatagaggttatttgagggctctgtccactgtactgggtgacccctttatggggcagtggcctttggcctttttagctgtatgactcaggggcaagtctcatatctcttccatctcctgccctttaaacttggtgtgaagttaccaagagcctcctctcccaaccagctgggacgtgaaactgtgggctccactgatcacaagcagtggggtgaggtggggtggagcagatgtggcatgtgtcccgggcttcctgcctcatgaggactcagcagagctttcacccccagaaactgcaagttgggacttgtccctaggaaaatccagttgctgccaaggtcgtgcagtcactcagccctggagtcaagccagagcaggcaggtaggtgccagggctccctcatgggcaaactcactctccgttttccctctcctgaagggggaggagaggagccaggtagaccagccacctttaattttctttttgcctgcaaaacggtttccttggacacaggcaacacgaggcaggggctgccaggtgtctagacttcagatcacctgatgtgcctggcaggatgtggctcagcctgggagaaatcatcccttgcgctgccccgcccggcccctccttacccctaggccacccgcctgacgacatccttgggaaaggccctcagcctacagcacctgtcagctgctgtctgaaggaggtagttggcagggggaagtgataggggggaggctcagtaaaactgaaggcagagaggaataatcatacttctgttttcaatgcacttctctatacgaagtgctgctggcacgttacctacattaactcagttaattctcatgtctatcctctgagacagtcactattactatccccattttatagatgaggaaactagagctcagacaagttaagttgcttgcccagggtcacctagtaaaacctggactccagcccaggtgatctggctccagagccctcctgcttaaccaccaggatacagcctttcattcagctctgttctgtctgccttgctgcatggactctgtgatcaatttcttgagtatgtgtctgtagccatgctctttaaacttgtacatggccccatttatggatgaggaaactgagacctagagacattaagtggctttttaaagcttacgtagtaactggcagagctaggaccacaacccgggtgctttttgccccaaagtcccgggtacttttacttggcagagcagggttaccctacttggggatctgggtcgggggacttaggaggctggaggaactgtcagactgtttcttcttttgggaattgaccttctggccagggctgcgattaggaaactgctggactctggcaattcacacatatttggggggcattcacacccatgagggacacctctggggggaaaacaaattgattttagctgataatacctggtggcaaacaggaccctggtccttgctcttgcaatagacttgcctttgttgacattagcttgcccttcagttgcctgctctcccagtgaccttggtgtgccaggctggctgagctctgctggtgggggtcaggcctcctgtgggaaggaagcaggaagaccagctggaaggagtgagagagaccctctggtaggaagacgtcacctgaggtgacacagcaaagcccggccaggtaacatagtgtctaatctccgccgtgaccagggccttccttgtatctctgctgcagg

SEQ ID NO: 20 - DNA, 3486 bp, Homo Sapiens
aactaaagaggatgagacctcttgcttgatcctaggtgaattcttttctgtcagttaggtaggaagtcctgacttgaaaactagttctgggcactgccccctttactgttctctgggtatcaacccctgtccttcaattttagttgaactagtggatggtgataccacaggctcaagacagctgcatttaaatatcagtgaccacaggccacatcaaggaaacatctgcaggcaacccagggcctgggaaggagccattttcagtcacttgtaagacagcaggacctgcagactacagcacaatcaaactcagacaaaaccctgaaccagtgagaaccattaggaaggaaaggaacagaaaatgaaccaacctgagtgttaggagacttgcatctagtcctgactccggtaccaaccgaatgcatgtccctggacaggaaacctctctgagtctcgatttcctccgtggtaaaaaggagagggttaaaccacagggtcccgagggtcccttccagctgtcacattctggagcgtatgagatgaggtaggcacacaaagtggacaagatgtggctaagaaaacaagctacacatcaagctcatctgtagcataggtgcttaagaaaactttgctgctgtgtaatattagaacggaaggttggtttccagtaaaatgcattaactttggctcaaaccaagatgatgggtaccgggcatgggggtggggaggcagttgaagatccactgagctttgtctcagggcagccctgctcatcgtcctactttaccttccaccacggtgctcaagcccacactgagagagaaatttccagctgcaaaagggagaagagaaacgctggaatactagtatcggacgttaggacatggttgtggtgttttaaaaatcatttcatcatctggagtttgaccccgaggggagtattttcacccttcagccctctgaaagcattcactagcatctgaatattgttctgagtttgttggagcagtgaaatctggtgagagagaagggtggaggaaggaaggagctgttgtatttggcggctggactcaggtagaggaaactgctacaatcccgggaaagaacagaaaagtagaaagggacgagttcccacacgcagccaatgtccatggccttaactgtgcttgggaaggaagatcctgggccaggggtgtaccctcgtttttcaaaactaaacgtgtctgagacagctacaaagtttattaagggacttgagagactagagttttttgttttttttttttaatcttgagttcctttcttattttcattgagggagagcttgagttcatgataagtgccgcgtctactcctggctaatttctaaaagaaagacgttcgctttggcttcttccctaggcccccagcctccccagggatggcagaaacttctgggttaaggctgagcgaaccattgcccactgcctccaccagcccccagcaaaggcacgccggcgggggggcgcccagcccccccagcaaacgctccgcggcctcccccgcagaccacgaggtgggggccgctggggagggccgagctgggggcagctcgccaccccggctcctagcgagctgccggcgaccttcgcggtcctctggtccaggtcccggcttcccgggcgaggagcgggagggaggtcggggcttaggcgccgcggcgaacccgccaacgcagcgccgggccccgaacctcaggccccgccccaggttcccggccgtttggctagtttgtttgtcttaattttaatttctccgaggccagccagagcaggtttgttggcagcagtacccctccagcagtcacgcgaccagccaatctcccggcggcgctcggggaggcggcgcgctcgggaacgaggggaggtggcggaaccgcgccggggccaccttaaggccgcgctcgccagcctcggcggggcggctcccgccgccgcaaccaatggatctcctcctctgtttaaatagactcgccgtgtcaatcattttcttcttcgtcagcctcccttccaccgccatattgggccactaaaaaaagggggctcgtcttttcggggtgtttttctccccctcccctgtccccgcttgctcacggctctgcgactccgacgccggcaaggtttggagagcggctgggttcgcgggacccgcgggcttgcacccgcccagactcggacgggctttgccaccctctccgcttgcctggtcccctctcctctccgccctcccgctcgccagtccatttgatcagcggagactcggcggccgggccggggcttccccgcagcccctgcgcgctcctagagctcgggccgtggctcgtcggggtctgtgtcttttggctccgagggcagtcgctgggcttccgagaggggttcgggctgcgtaggggcgctttgttttgttcggttttgtttttttgagagtgcgagagaggcggtcgtgcagacccgggagaaagatgtcaaacgtgcgagtgtctaacgggagccctagcctggagcggatggacgccaggcaggcggagcaccccaagccctcggcctgcaggaacctcttcggcccggtggaccacgaagagttaacccgggacttggagaagcactgcagagacatggaagaggcgagccagcgcaagtggaatttcgattttcagaatcacaaacccctagagggcaagtacgagtggcaagaggtggagaagggcagcttgcccgagttctactacagacccccgcggccccccaaaggtgcctgcaaggtgccggcgcaggagagccaggatgtcagcgggagccgcccggcggcgcctttaattggggctccggctaactctgaggacacgcatttggtggacccaaagactgatccgtcggacagccagacggggttagcggagcaatgcgcaggaataaggaagcgacctgcaaccgacggtaatgaccctttcccaaccatagaatgtgtttggggccccgctttgcctgctggagggtgttaaccttagcttgcttttcggcgtattctgatttagctttgggagagctaactttattggtcttaggtgttcagtgctacctggcccactgcttgtctgtttgtgacttttaagtcagaaactggagatggtaagatccgataatttccctaacttaatacatcgcggtccctctcactagcaactcctaggtatgtgacaaagttgggatgtttatcaacggtccgcctcctggctagggaaagagctctggggcggagaatgcactttctgttttttgaaaacaacctcattttgtgcccttaaaagccactggggatgacggatccaggattgtgggtggaggtagtgggtttttcatcccctgactatggggccaacttctgccagccattgttttttctaataaagattgtgtgttctttttaaaaatttcccctgcgcttaga

SEQ ID NO: 21 - DNA, 2401 bp, Homo Sapiens
tcatcaaagaaaaaaaagatgacttactagacagttgttaaggcactcacataaaactacacgatagcaggatagatggtaaccaagagggaactcaggacccgtcactaccagctggaaacacctgacctccagcctgcaaatgtgacaagctagaccaacaccagcaggacactgaacacagcttgcagggatgagtctctgcgtcatttctggacatgtgtccaagtaaccagaacaactcaaaatgccaccaggcccttgctgtcattcccataaacctcgaacagtgagttgggtcttcaaggaacctgtctctgtcagcttaccttatgctgcataacaaacaggcccaaagctcttggcagcgtacatcaagcatggaggatctctcactcaccacgacagtcccttcgctggagggctggggttgtactccattttctcttttggaaggggcggcccctgtctgaggtctcatttgtctcacagcagagggatgaaacggcaggaccctggctttgacgggctccatttggcaatggtacatgccaagtgggtcacgtttcactgcccagagcaagttacatggccacgtctgatattgacgtgcgggaaatgcagaatcttcctgcatttggggaggcagatatttggacaacatgcaattcattacagggccagctggatgaagaacggccaagggcccaggctcttcaccccgagccaggccgaaccagccggggccgtgagatcaagccacggtcatcagtgttcgtttggaattatgccttgtccttgccgtgtccacattgtagtagggtttctgttttttaattcatctgaaattggtggtgggtgtggtacacagatgagaaacaggaactctccacgctgggctttaacaggagctgcggtgggaacacaaatggtgcagccactttggaagatagtttggtggctccttacaaaactaaatgtacccttcacatatgatccgccacacaccatccagcaattgtaccccttggtatttgcccagatgagtcaaaaacttgcatccacacaaaaacttgcacgtggatgttgatagcagctttattcataattgcccaaacctggaagccttcaggaggtgagtgggtaaacaaactgtggtgcctccggtcagcggaatattattcagtgctaaaaagaaatgagctcaagtcatggaaagacatgaaagaaccttaagtattattaagtcaaagaagccaatctgaaaaggctgatgctgtatgagttcacatctatgacattatagaaaaggcaaaactacaaagacagtaaaaggatcagtggttgcaggagctagggaggagggagggatgaataggtggggcacagaggatttttagggcagtgaaactaccttgtatgatactgtaatggtggacacaggacagtaagcatttgtcctttatcccgtagaatgtacggcactgagaacggaccctcctgtaacatatggactttcagttataatattgaatccctttcggggttccgtaccgcccgcagcgccctttaactcccgcccccgccccgctcaccgcccccttcccctgctacagcgcgctcgccccgcggccgccaatcagccgcgcgccccggccgcgcgccccgccccgcccccggtgggtgtgcgcgcggccaatgggcggtgcgcgggggccgggccgcggcggggcggggcagcggggcggccgccaatcgccgtggtgttgttgaaactgaaaatactacattatgctaatcgcggccgggcccgcgcgcacgggggtggggcccgcgcgtataaagggggcgcaggcgggctgggcgttccacaggccaagtgcgctgtgctcgaggggtgccggccaggcctgagcgagcgagctagccagcaggcatcgagggggcgcggctgccgtccggacgagacaggcgaacccgacgcagaagagtccaccaccggacagccaggtagccgccgcgtccctcgcacacgcagagtcgggcggcgcggggtctcccttgcgcccggcctccgccctctcctcctctcctttccccttcttctcgctgtcctctcctctctcgctgcccgcgtttgcgcagccccgggccatgtccgacgcgtccctccgcagcacatccacgatggagcgtcttgtcgcccgtgggaccttcccagtactagtgcgcaccagcgcctgccgcagcctcttcgggccggtggaccacgaggagctgagccgcgagctgcaggcccgcctggccgagctgaacgccgaggaccagaaccgctgggattacgacttccagcaggacatgccgctgcggggccctggacgcctgcagtggaccgaagtgg

SEQ ID NO: 22 - DNA, 5660 bp, Homo Sapiens
aattagaacttttacctccttgcgcttgttatactctttagtgctgtttaacttttctttgtaagtgagggtggtggagggtgcccataatcttttcagggagtaagttcttcttggtctttctttctttctttctttctttttttcttgagaccaagtttcgctcttgtctcccaggctggagtgcaatggcgcgatctcggctcactgcaacctccgccttctcctgggttcaagcgattctcctacatcagcctccgagtagctgggattacaggcatgcgccaccaagccccgctaattttgtattttttagtagagacagggtttcgccatgttggtcaggcttgtctcgaactcctggcctcaggtgatccgcctgtctcggcctcccagaatgctgggattatagacgtgagccaccgcatccggactttccttttatgtaatagtgataattctatccaaagcatttttttttttttttttgagtcggagtctcattctgtcacccaggctggagggtggtggcgcgatctcggcttactgcaacctctgcctcccgggttcaagcgattctcctgcctcagcctcctgagtagctggaattacacacgtgcgccaccatggccagctaatttttgtatttttagtagagacggggtgtcaccattttggccaagctggcctcgaactcctgacctcaggtgatctgcccgcctcggcttcccaaagtgctgggattacaggtgtgagccaccgcgtcctgctccaaagcattttctttctatgcctcaaaacaagattgcaagccagtcctcaaagcggataattcaagagctaacaggtattagcttaggatgtgtggcactgttcttaaggcttatatgtattaatacatcatttaaactcacaacaacccctataaagcagggggcactcatattcccttccccctttataattacgaaaaatgcaaggtattttcagtaggaaagagaaatgtgagaagtgtgaaggagacaggacagtatttgaagctggtctttggatcactgtgcaactctgcttctagaacactgagcactttttctggtctaggaattatgactttgagaatggagtccgtccttccaatgactccctccccattttcctatctgcctacaggcagaattctcccccgtccgtattaaataaacctcatcttttcagagtctgctcttataccaggcaatgtacacgtctgagaaacccttgccccagacagccgttttacacgcaggaggggaaggggaggggaaggagagagcagtccgactctccaaaaggaatcctttgaactagggtttctgacttagtgaaccccgcgctcctgaaaatcaagggttgagggggtagggggacactttctagtcgtacaggtgatttcgattctcggtggggctctcacaactaggaaagaatagttttgctttttcttatgattaaaagaagaagccatactttccctatgacaccaaacaccccgattcaatttggcagttaggaaggttgtatcgcggaggaaggaaacggggcgggggcggatttctttttaacagagtgaacgcactcaaacacgcctttgctggcaggcgggggagcgcggctgggagcagggaggccggagggcggtgtggggggcaggtggggaggagcccagtcctccttccttgccaacgctggctctggcgagggctgcttccggctggtgcccccgggggagacccaacctggggcgacttcaggggtgccacattcgctaagtgctcggagttaatagcacctcctccgagcactcgctcacggcgtccccttgcctggaaagataccgcggtccctccagaggatttgagggacagggtcggagggggctcttccgccagcaccggaggaagaaagaggaggggctggctggtcaccagagggtggggcggaccgcgtgcgctcggcggctgcggagagggggagagcaggcagcgggcggcggggagcagcatggagccggcggcggggagcagcatggagccttcggctgactggctggccacggccgcggcccggggtcgggtagaggaggtgcgggcgctgctggaggcgggggcgctgcccaacgcaccgaatagttacggtcggaggccgatccaggtgggtagagggtctgcagcgggagcaggggatggcgggcgactctggaggacgaagtttgcaggggaattggaatcaggtagcgcttcgattctccggaaaaaggggaggcttcctggggagttttcagaaggggtttgtaatcacagacctcctcctggcgacgccctgggggcttgggaagccaaggaagaggaatgaggagccacgcgcgtacagatctctcgaatgctgagaagatctgaaggggggaacatatttgtattagatggaagtatgctctttatcagatacaaaatttacgaacgtttgggataaaaagggagtcttaaagaaatgtaagatgtgctgggactacttagcctccaattcacagatacctggatggagcttatctttcttactaggagggattatcagtggaaatctgtggtgtatgttggaataaatatcgaatataaattttgatcgaaattattcagaagcggccgggcgcggtgcctcacgccttgtaatcccttcactttgggagatcaaggcggggggaatcacctgaggtcgggagttcgagaccagcctggccaacaggtgaaacctcgcctctactaaaaatacaaaaagtagccgggggtggtggcaggcgcctgtaatcccagctactcgggaggttgaggcaggagaatcgcttgaacccgggaggctgaggttgtagtgaacagcgagatggagccacttcactccagcctgggtgacagagtgagactttgtcgaaagaaagaaagagagaaagagagagagaaaaattattcagaagcaactacatattgtgtttatttttaactgagtagggcaaataaatatatgtttgctgtaggaacttaggaaataatgagccacattcatgtgatcattccagaggtaatatgtagttaccattttgggaatatctgctaacatttttgctcttttactatctttagcttacttgatatagtttatttgtgataagagttttcaattcctcatttttgaacagaggtgtttctcctctccctactcctgttttgtgagggagttaggggaggatttaaaagtaattaatacatgggtaacttagcatctctaaaattttgccaacagcttgaacccgggagtttggctttgtagtcctacaatatcttagaagagaccttatttgtttaaaaacaaaaaggaaaaagaaaagtggatagttttgacaatttttaatggagacgggagaagaacatgtagaaaaggggaaatgatgttggcttagaatcctaactacattggtgtttaatataggaacatttatttatataacattttaaagtactaaattcatattagtatattatcaaatggatatattatcaaatgggtttaagcatcctacacattttaattcaattgattcattttctttttgctttggatttctatcatgatttaaatatttacatatgggttactttttagatttttcatactatgaaatataagaaaaacctttaaggctagttttatgaccaagacgaaggacttcattgaatacacaaaacaataaatatactgcaacattttgtctttctttttgtagctgcaatttggtttgcttatactttctctttgtctctttgaaaactgagtcagtttcactttctcaggacaggatttaataaccataatataatttagtataattccttgatttaggcaaattatgcaatttgtgtttagtatgaaatgtacctaaaaataagtaactcctctttaacaccaccatcctcaaactaatataacaaataacagttatcctaaaataaattgtctacttccaccatgcagcactcaaattttaaggttgctatgactgcagacagtattttaaaattcctctctggaaatggctttgtttccaagatgatttaggaaccaaagaggtgaccatctcttgtttaatgaactctcaaatcataaacctgggaagtgttttagtttcctactgctgctgttacaaattatcacaaatgtgttagctaaaacaaacacaaaattattattttacagttctagagatcagaagtcaaaaatgggtccacaaggtttcattccttttggaaactctaaggggcaatctgtttccttgtcttttccagcttctagtgaccatcaaattccttggctcatggtctctgtattttctctgtggcctgtgcttccattcttgtatcttctctctgactgtgaccctctaataaaaacacttggggttatgttgggcccaccctgaaaattctggataatctccctcaagaccattaattaaatcacatctgcaaagcctcttttgccacataagttaatgtattaaaagtttttgaggattaggacatagacattgggggtgggggggcattattcagcctaccacaggaaggaattttagggttaattaaactagccttcttattttatacttgaagaaattgaagttttggaattggagagcattatgctaaatgaaataagccaaacacagaaagacaaatatcacatgttctcacttatctgtgaaatataaaacaattacattcttagcagtaaagagtagaatggtggttactagagctggggggtgggaggaatggggagatggtaatcaagatataaagcctcagttaagatgggaggaataagtttgattgttttttttgagatgtgtttcatagcatgatgaatatagctaaatagtaaatcccaaatgctctcatttgacaaaaatgtcaaatatttgagatgatggataggttacttagcttgacttaataattccccattgtgttcaaagatcataacttcatattgtaccacataaatatatacaactgtactatcccaatatataattttaaaactaatataatgaaaaagaaattgaagttcaacattcccagaagctaagtgtaacttaaaagttttgtgagaatttgttttaacaaacaaacaagttttctctttttaacaattaccacattctgcgcttggatatacagcagtgaacaaaaaaaaaaaaaaaaatctccaggcctaacataatttcaggaagaaatttcagtagttgtatctcaggggaaatacaggaagttagcctggagtaaaagtcagtctgtccctgcccctttgctattttgcccgtgcctcacagtgctctctgcctgtgacgacagctccgcagaagttcggaggatataatggaattcattgtgtactgaagaatggatagagaactcaagaaggaaattggaaactggaagcaaatgtaggggtaattagacacctggggcttgtgtgggggtctgcttggcggtgagggggctctacacaagcttcctttccgtcatgccggcccccaccctggctctgaccattctgttctctctggcagg

SEQ ID NO: 23 - DNA, 5033 bp, Homo Sapiens
gaaaaccaggttgagcaggttggtttttcaaagaaattcattgagcttccataatgtcctttctatttgacgggagaaaaggggctttggaagatcaagtgtgaagctttagaattctgtctggagctggttaggaccacccaggcctgagtataagcaaagcgctgtccgtggtgctagtaagcgcgaatgcccccggcaacgttttccctacccaaagttgtttttcattcagtcaacttgcttcgcgaagctcacacatctgcctcgtgcaagattctcagtcattttacttagtcattggttctttccctatcaccattctttatgtccccctcaaagaaaaacattatcttccatttccttatcaactccaaacagctttcatttttctgacatatttactacctaagaaaatggctcaagaattgggtcagactatcttgtcctaacttttctgataagtttcagagaaactcaaaggtcaaaacaagagcataagagtaaaaggtagagaaattaagaaactgaagactaggaaatgggggttggatgggaaagaaaaagaaattgttattaatgctacccggttcccttccctgtccaggtggatttcagctctgttgaggctctgtcagtagattttcagccctaaccagcacttccatggtggtggcacttccactgcctttaaaagaaagagctttttttaattctacagggatttgggggatgaggagtcagagctaaggtatcctaaaaaaaacatgtgaagactctcattttgcaatacacaagcaattgccctcctgttaagactttgtcttcctcagcactccgaaccaaaatgattctgtaaacaaaaattgttcacttttaggagaggtccacttatgcagttcctcaccaaagtttttaggcaacaaatccataacttgcggttctcttcctatccaatgtagcatccgctgaaatgttttaaatattttaagtaataaatgttgattcaaactcacctaggaagattaggaaggggaaaaaaagcacttggcatttaaatcttcagaagagaatttaatgacaggttcagcctgtttaatgacaagcccagcaccacacccctctcttatgatgtttcattattactgcataaatttcctttattactcatgataaataaaaataagatacctgacaaagtgggtttaaataggtaagagtgcaaacaaagatttactgtacaaatatgatgaaactgggatctcagattcttaaagtataatttttttttgtcttatgtgtgccaggttgccactctcaatctcgaactagtttttttctcttttaagggttgtatccataatgcaaaaatggaaagaattaaaaagcacacgcaaaacatgattctcgggatttttctctatttttatggttgactaattcaaacagaaagacacatccaagagaaaattgctaagtttgatacaagttatgaaacttgtgaagcccaagtactgcctggggatgaatttaacttgtatgacaggtgcagagctgtcgctttcagacatcttaagaaacacggagttattttgaatgactttctctcggtcacaagggagccaccaacgtctccacagtgaaaccaactggctggctgaaggaacagaaatcctctgctccgcctactggggattaggagctgagggcagtggtgaacattcccaaaatattagccttggctttactggacatccagcgagcagtgcagccagcattcctggcggctccctggcccagtctctggcgcatgcgtcctagcatctttgggcaggcttccccgccctcgtgacgcgtcggcccgggcctggcctcccggcgatcacagcggacagggggcggagcctaagggggtggggagacgccggccccttggcccagctgaaaacggaattctttgccggctggctccccactctgccagagcgaggcggggcagtgaggactccgcgacgcgtccgcaccctgcggccagagcggctttgagctcggctgcgtccgcgctaggcgctttttcccagaagcaatccaggcgcgcccgctggttcttgagcgccaggaaaagcccggagctaacgaccggccgctcggccactgcacggggccccaagccgcagaaggacgacgggagggtaatgaagctgagcccaggtctcctaggaaggagagagtgcgccggagcagcgtgggaaagaagggaagagtgtcgttaagtttacggccaacggtggattatccgggccgctgcgcgtctgggggctgcggaatgcgcgaggagaacaagggcatgcccagtgggggcggcagcgatgagggtctggccagcgccgcggcgcggggactagtggagaaggtgcgacagctcctggaagccggcgcggatcccaacggagtcaaccgtttcgggaggcgcgcgatccaggtagctggggccccagggcctcgccggcagggggcgcgcgaacgcggggcgcggcctcggcggatcggggctggaacctagatcgccgatgtagatttgtacaggagtctccgttggccggaggtgtgcattccacgcgtaaaacaggcttttacccagcaaaaatcctaaagagagacattgaaaaacccactgtttaagctttttttagtggtttttgttctgccatctcatgatcagagatgcaaggaatagactgaattggggagaaaaggagaaaaggaaagcttatttagggaagaagattatcttgtctgtctgctttcaacgataaagataagtaaagtataagttacgcattctagattggatttaaggaattctacaaaatcatagtacatggaaaaaatcaatgtaaacttctaagctactatatgaaatctgttgtattgttttctcatagaggttaattgagaatgagacgggattcctcaaccacagtacttagttccttttatgttagcagtgtcttatgagtgatgcataagagaaaaaatatatagttctataggtttctcattctttaattatcatactcagtgcccagattacaaaaatattcctgcagcaactgttaggtcctttttgaatggcaaaggatcttcataaataatgcatctttatcttcattgttaaaatacacttattcaatgtttaagtacgaatcctgctttaattagtactgatattttttatttcttttacaatctcggacaactcttttgtactttaccgttggctagtggtcatattcagtactcacctcactatcaccctctaaaactaagctaatattaagggatcttgttaatagtatagattttaaagaagtgttcatttcttttgaattcttagaataatggtataacaaatgagggatttttaaaggagcaaaaatattgtaaagtgcatcttaaaaacttaaaattttattaataattataaaaacaagttatatatgtaattcaccattttctgaaatactaacagcagctattttcccctttttttctatgtaaaatatccttacatcactagtagatataacttatcacggtttttaagagatgaaatgaacatttctaatattaatgaaacaagccaacaaaacatgagaagtatactgcctttcaattaaatggtatattttaaagtgcataaacccataacaaataactcgattttagacatttagttaccaaaaattgtcttataattgactttaaatatgacagcaaatgttttcataatgttcatgtacacaaatggctgctacaggattactcctgcaaaacatcattttttctaagttatgcatcatcctgattgactgctaacatccaagctctatttatttatttatttattttattttttttgagatgaggcctcactctgtcggacaggctggagtgcagtggcacaatctcagctcactgcaacctcttccaggatgcaagcgattctcctgcctcagcctcctgagttgctgggactacaggcacgccccaccatgcccagctaattttttattttttgtagtagagacgggatttcaccatgttggccaggctggtctcgaactcctgacctcaggtgatctgcctgctatggcctcccaaagtgctgggattacaggcataagccactgggcctggcccaagctctttttatatagcaaaatatttactgtttaacatttttaaatcttagctattataaaatcctgtagtatacaaatatagttagttttatattacattaaaaatattatagtctaaatttaaaatgatgaactgttaaggaaaaatcatttattataattttataagattttgcatgatttaatttacttttcccttctaatctccaactttggctcaaattatcacactacaagccagttatgagctcagacacatgacaaacaaaagccttccgcacgggatttgctatgagaactaaataaattaaaaaaaaaagaaagaaaaaaacttagttgtttattttctcccctaaaccattactcccaacttctaacaaacagtagttgactacctaataaatatttgtagacctggattatggaggaggggtcagcaaggcaaataatttaaaactttaaaagccgaataaatttaactctgcccctaaatcatttaacaaaatagattcccatgttccaatggaaatcaagatttgtttttccataatgatgatcatcactttaccatcaactttcttgtctctgcacgtttagagaataaaatggcatttaatttgtactgagtataacctgaaggtggggtgggaaagtggattgcatcagcaaatgaagaaacaccagacatcagagacctgaacacctctgcactgggtgaaaactttgcaattaggtgtttctttaaatggctccacctgccttgccccggccggcatctcccatacctgcccccaccctggctctgaccactctgctctctctggcagg

SEQ ID NO: 24 - DNA, 5942 bp, Homo Sapiens
caaggaccaggaccttaatataaacccagctccccattttcccgggtttctcatgcttccctaaactcggtcgccccctacagccccctgcccctgggttcttttccacatcccccaccactcctccatttcgcatccaagacttcatgaaaggctttcccagaaaagaaaaaatgaggagtcttgcgacttgaacagccctcccctgcccgtctgcaaatttgaattcctggatttcacaacagtgagctcttcttgtgcctaccacccggcatgagcaagacaagggggtgggtggtgggagagtggggaagtgtgggaaagaaaagtgtagacaaatgggtggaacaaagaagtttgacttaaagtttagatttgggggctagagttctggtcccagttcaactaagtgtacaagcttgataatcgtgggccctcctatcacactggcctcttccagcaaaaccctacccattctcatctctagaggccttgacttcccttatcaccctgcattataatatttgataacatgggccgggagtggtggttcatgcctgcaaccccagcactttgggaagccgaggccggcggatcacctgaggtcgggagttcaagaccagcttggccaacatggagaaaccccgtctctactaaaaatacaaaattagctgggcgtggtggggcatgcctgtaatcccagctactggggaggctgaggcaggagaatcccttgaactcggggggcagaggttgtggtgagccgagatcatgccattgcactccagcctgggcaatgagagcgaaactgcatctcaaaaaaaaaagaaaaaaattgataacatggcactttccctctccagctgtgaactctttgagggttgggaatgtctttacctgtattcttggcacatagtatatggacttatgtttgtgaaatcagtgaattggctgtagtcagggaactcctcctgggggaagtgagacttgcacgaagctgggcaattcttggtccaggggggttgaaagaataggtgggggactcccaggagggtctgggacctgaaagtgaacccagattggcagggaggtgaccttatcatgccacctggagaggctgccccttctgactcaggtgggacttgcatgtggctcccaggcttctgtttggcttcctcaaaatagcttccagaaaagtgaataaaccacaaatggttgatttatttctgactctcagcccgtctctcacgaagacagagcctattgaccaaaaacttcaggatctgcatctgggcagatcccaggaaggggaagtcaaagggcccaggtcagaggcccaagttcagacttcagcagcagactagggtcagactttaccaaagtcagaactcgaggttcatgtaagtccttagatcccgctcccaagccctgtctttctcctccctccttctctcctccctccagctcagtgtggccacccgagggggtctctccctcccagccacagctcgggtatcccaagctgggaaatgtgtcactcggggctggggtgctgatctgtagcctagtccttcctggtctctcttgaggacagtggggatgggattggcacggccctcaccccggggtcccagccccattcctggctcccagccccccctcagcagcagtttgaagcccgggctggagatgggcaccccaagtggaaggttgggaggctgaggaccctgcgacagtgacagcaggtgagcagtggatgtgcggtggttggaatcttggaagtgggtgtcacagttctcgcagtactggagggagggagtaggagacctgcagagaaagaagaaaaagcattaagggcaggggaaggaaaaggggaagagttgaggcctcagagggggctggcagggtagaataggatcttttcagcttttctgctaaggaacaaattgccagctaggcatagtggctcacgcctgtaatcccaacactttgggaggcagaggcgggcagatggctttgagctcaggagtttgagaccagcctgggcaaaatggcaacgcctgcttttttttttttttttttttgagatggagtcttgctctgctgcccaggttggagtgcagtgccatgatcctggctcactgcaacttccaccttagcgattctcctgcatcagcctcccaagtagccgggattacaggcacatgccaccatgtcccggcaaagcctgctttctacaaaaaatatgcttgagcccaggaagcggaggttgcagtgagctgaaatcacaccattgcacaccagcctgggcgacagagtgagatgagtgagactttgtctcaaaaaaaaaaaaaaaaaaaaaaaaagggacaaattgccttccttcctacttaacagtgagggatccaggctggtccaaaggtggtggtgagttatctgaattaattgttcactcagttacagatcaaactccttactccacttttcccctccttctcactactgcacttgacttgtcttaaaaacaaatttctttaaaccattgtgggatccagagcagaatagttgaaagaaaaaaatggtaaccagacctagcaaactcttgggcaaggggagggacattagtcataatgactatagctaacattcatgtattgcatactatgcggcatgcactattctagcattttacatatattaacccattgaatcctaacaacgattcttactacccccatttctaagatgagaaaactggaacatgtagacattaggttgtttgcccaagtaagtggaatcaggctttaaatccagggagctcatgtttataaccacttgactatactaccctgtcaacctacacatgaggataaggaaagaactcttcagcactgtgctggggcgtctggtgtggtgtggctgggagaggcagaacacaatgagacatgggtctgagctaaagtttccccttaccggttttccgggctccttgtctctccatggctctccctgaccatgcgggctacctcagggaagccagcttcttcagcgagctgagccgcatccctgccactcagctcacagacccccacccaggcagccccacggcccaggagatagctcacagctgccccctggcccgctcgagcagcacacatcagtggggtccaccagaaggcatcccgggcgttgatattccccccagctcctcctgcctcatgcggttccagcagtctcctaagttctggcaggtccccctcctgggctgccctcagtatccggtgagtcatcttatcctcagcctcaagggatctcccttgtccatgtcttcctgatgctccttctgccactgcttctgctgctggtgccttcattattcttcttttctttctctttctttctctggcaggttcagtctgagatctctgggagtcaggagcgctgctctcatccccaatcagggcctcatagaaagctcgggctgcagccccatccagggtggactctggcttctcgggctgtggctgctgctgcccatccttccagaggtcgctggggtcagtggctggggtgaaggtgatgagcaagggccgggacatggcttttgggagaactgagaaaatgataccaggcaagggaaggatgagacaagtaagccaagctcgtggtgaccctgtagcaaccacagcctcagagacctgctgggatgagaaaaagtagtcaaaaacactttcctgccactaaagtaaccccacaacttaggactctgcagggcctaagggagagagactttgcgtaaaaacatggaaccctacaataccgactttgctccttagtaaagattaataaaactccatgagactgttgtccagaggtcctgcgtccggcccccacccccatcctcaccaacaataaacaccagcctctttctgaaaccactttcccaccccgtaagacataccagtaggaaaaaaaaatcagcctggccctttaagtcttccgcgatcccatttcggagtttcctcttcccaaacaaaaatagatgggtcactccctagaagatctcggggagagtctcctatacgtgttgctgtgtagcttccgtaccgcaaaatggcgccattctaatcagaagagttgacacaatcaaatagccacacggcacgaagacgcatgcgtggcgacaacaacaacaaaaaccacaacccacattacttgagggctcgggcgtgcgcaaagctccgggttcagtttcccgcgctggaactttttcaatagtaaacgagcaaagctccgcgcgcccaggtggcgcgagcactaggatctgtcggttggggtcctacttttacataacgcccccacaatgcccttcgccttcctcaacgtggcccccgctccaagcccattttctggagccaggaatccactctgtgggttaggaaaggccctcaggaggcggagggaaacctgtggaatgccgagaagccgtgtaatgaaataacgtcacgcctgcccctcaccattactctgaccagggttcgaaggtcacacttagagcctaaggggaaatggagaagtgcaaagggacgagcagaatggctggcaccacctcaggttagcgcactgggacgttccagttctcacaccgcccaccccaccccacccaagtccctacgcacggagccaagccgcacctctcccctcatgaggcaggagcccggaggaaacagtatgcccgtcaagggtctctggcgggactgattcgcactaggggcccaacaggcaataaggacccagcggattggccgaggataggccagtcccctgggcagcagcgccgcgccgggactagaggggaacgtgaggagagctgcggaaagagatccagcctggcttcctcctttccccgccctaagtcagcctcttcacccagtgagcacaaaactgtattgcccagactcccgggccccgaacgccatacctggcttccgcttccggtggcttctcgttgtgccccgcccgcaagcgccctcctccgggccttcgtgacagccaggtcgtgcgcgggtcatcctgggattggtagttcgctttctctcatttagccagtttctttctctaccggggactccgtgtcccggcatccaccgcggcacctgacccttggcgcttgcgtgttgccctcttccccaccctccctaatttccactccccccaccccacttcgcctgccgcggtcgggtccgcggcctgcgctgtagcggtcgccgccgttccctggaagtagcaacttccctaccccaccccagtcctggtccccgtccagccggtgagtctgaagtcgtcgctgctccgagtcccttgtcgctgggagcggcacatggggtctccggactttgatgtgggggcgggggaggaagcgaccaggtccggcacgaaggagggagaggtggcctgaggagcggaggggggatgtgtggattccggtgaaagggacctgacaatcgcccccaacccgtgagaaaaggaggagcccggttcttgcttgagaatgataaacttggaaacccttgggaaaggcgtgggggtcatgcagagacttgtattggtagggagcctgagtcgaggtccctgccggagttgacacagaggagagagggccctggccttcgggagctccagggatgtgggtcgggctggtgggtcaaagtatctgttggcttctttcaagtggtgggaccccaaagaatgtttaacttcaaagaaaaggggctgagatgtaaattagaggagctggagaggagtgcttcagagtttgggttgctttaagaaagggtggttccgaattctcccgtggttggagggccgaatgtgggaggagggaggataccagaggcagggaaggagaacttgagctttactgacactgttctttttctagc

SEQ ID NO: 25 - DNA, 6090 bp, Homo Sapiens
cagagatggaatgctcaaattaggacaattcagggaggtgtgggagaggtgcagggggaccataagggatggagcaggaacccaaggtagtaatagcagagctggcaccaaccctaggctcaaaaagacaaaggagagagagtggttaccaaaacccagaaagagaaaacccggtaaaagacgggacctggtgaggagcagcaacctgtgtttggctgtggactgtggcaatcttgcagggaggagagcagaggaatgactatcttggcttcactctccttccttctccttcatctcatgtcaggtgccccattggctaaacctaccagcaaccagaggacaaggaatgcattaaaataatcttacggctcagagagtagattagatgtagagtgacaaatggattatatttagcacaatcgcaggtctatttgttgatccgtctccctcatcagactgagttacctgaggacagagaatgtttctcttatatctgtatccctaacatttggtggacactagatactcaagaaatgcttatggacgggatcagagaagatggtaaattgggcattagatggaggtttgtgctttctgagcttgccgcatgctttctggcgaatccaaggcaaaatgagaaacagaatgagctctgtacttttgtctggtaaaagaaaatatgatttggtgagaagaaatgaatacttttagcactcagtgctgggaggaactggaatcagtcatgtgactgcctctatcagaggctctcaactgcgtaacggacagaatctttaatggtgaaaccacaatgcagaaacattcttttttttttttttttttttttttttgagacggagtcttgctctgtcacccaggctggagtgcagtggcaccatctcggctcactgcaagctccgcctcccgggttcaccccattctcctgcctcagcctcccaagtagctgggactacaggcacctgccaccacacctggctaattttttgtatttttagtagaaatggggtttcaccgtgttagctaggatgctcttgatctcctgacctcgtgatctgcccgcctcggcctcccaaagtgggaaacattcttaaaaatattagcccttgataaaaccaaagccatgttacaaaaaagcaaccaaaaggtggaaatgagataatatggtccactttgagctgagaacatcttgccagaaaatgattgtctcagacttcaaatctgacctcctacataaaccttcagtgcaatcctccctgtattatctcttctctcatcagccaaaagatggaaaggataaactgaggaacttacgctggaggagcatggattcattagatggcagaaacctgggtttctgaatgactactgtggagctgatctctgcttatgccctgcaaacctttgtgctgagagcaagtaacacatttttaatgtgttaaacctctgggatttgttgggtcttatagcaatggttattttaccctaatacgactgtaaaataatgttctaaaatctacagtcgggtttgtttaaaatattatcgccatcattattataatccatagtccatatcataattatttttatagaagtccttctcaactggcatctcataatttgtggcttcttatattgttgccttctatgtgtgagatgcctctctgagtcctttttgctagggacatgatagaaaataaaatatccaacattctggtgtattttataatgtacaaagtcctgtttcatgcattatctctttagattctcccaacaaacccaaggaatatgtaagggtctataatcatcttcatttcacaggtgatgaaactgagacgtttacatgtaaagtggaaataaccacttatttatttatttatttattaaataaaaaccccgctaatttatttaaagattaattgagagaattatttcatctgtctggaacctggtatgtgttaagagaaaagttttcttaatttttctttttaagaagataatctattgctacataacaaaccactctgaaataatgacttaaaacattaaaagtcattgattttgctcacagaacttgaactggaagatataaacaactgggagtgagggtggggctggacagctggcttctctgggcatctctcgttctttctgtggttttgtcacatgtctctacatggcagccctagggtaatcatgacagctgaaggctttagagtgggtggagggggagagggagggagggaaagagagagagagagagagagagagaaagagaagcaagcaggcagaagctctaatgccttatgacctaaccttggaaataaattacactgtgccactgccactaccttttcttagaagcaagcagatagggttggtgaatatttattgagaggggaattagactccacctcttgattgggggagtgtcaaagaatttgtgaatatgtttttaaatgaccacatttcccctttctaaaatgcttgtctaaattggtgtacacaaaaagctcgggggttagtgactcatccaaggttattaagctgttaaatggttccaccaatactagatctaattttgtgactccaaatttcatgctctttttcactactccagataatctccggtgaacatcattgtccattagggtagttaagacattctagctgccaaatagattcagtccttttaattgcctcggacaatatattttttattttgcagaaaataaatattacccatatggcagtcatccataaacaccttccaagtttatcccaaacatctgtgttttaaattttttctcccaacagatgtattcatttgcattttcccagatgaatcactctttttttgttgttgttgttatttttgactgtatttctcacctctcaagacccttttgtattatcaagcccactgcttaagctaataccatctcccaatttggggacttccccttgattcctgtgtgcccttcctgtgggtcattaatgcaatgttatttaagactaggatttggctgggcgcagtggctcacgcctgtaatcccagcactgtgggaggccgagccgggaggatcacctgaggtcaggagttcaagaccagcctgaccaacatggtgaaaccacgtctctactaaaaatacaaaattagccgggcatagtcacatgcctgtaatcccagctactgggtagcctgaggcaggagaatcgcttgaacccgggaggcggaggcggagtttgcagtgagccaagatttcacaactgcactccagtctgggccacaagagcgaaaacccgtctcaaaaaaaaaaaaaagactaggatttgacataaggcctgaggggtattcttttgttttgttttgccttgttttcaagaggccaaaatcttcacagttgaaaatttctgttgaaccacagagatttgaaccaactcagtttagaaagcctggggatttgaacaacggtatggatcggaaatctcttcatctgtcagttttcatcattctaggcagtaaaatagatttccctttaggagcttttcaccgtttggggttctccagcagtgggatgtggggaatcaacccttcttcgtctccacccaaacattaggtgggagcaaggggtgggaagtagagaaagtggatagaggtctccagtggatatgggatctttgtgtagaccagcacagtcctcagaaatctcatgcaagcaacataggtactgttatattttctagtggccaccttttaaaaagtaaacaggtgaggccgggcgcggtcgtcacgcctgtaatcccagcactttgggaggcccaggcgggcggatcacgaggtcaagagatggagaccatcctggtcgacacggtgaaaccccgtctctactaaaaatacaaaaattagctgggcatggtgacgcgcgactgtagtcctagctactggggaggccgaggcaggagaatcacttgaaccctggaggtggaggttgccacgctccactacactccagcctggcgacagagtgagactccgtctcaaaaaaaagaaagtaaacaggtgaaattaattttaataatatattttgtttaacccaacgtatccaaaatactatcatttgaaagtgtaatgaatataaaaatattcatgagatatttttcattctcatatccatactgtcttggactctaatgtgtattttacacttacagcacaattaatttgggactagctacatttcagctcaacaatagccaatagcatatgggatagcgcaaataaactctgcgtctctgttgcttctttgggtctcggagacctcaaccctttcttcagattgcaaaccttcttgccttcaagcctcggctccaacaccagtccggcagaggaacccagtctaatgaggtacgctcccttcctgccattctctattccattaacctgtttcgtggtaaacgtaggactgatcctccaaaattaccttattaattagcttacatatttattatctatctgtcccaccagaatgcaggtttccggaaggcagggatttaaaaaaatctgttttgttctatgtgattttcccataccaagcaccgtgcccggcacaagctgggatcccagtacacatctcgggacggaagaaccgtgtttccctagaacccagtcagagggcagcttagcaatgtgtcacaggtggggcgcccgcgttccgggcggacgcactggctccccggccggcgtgggtgtggggcgagtgggtgtgtgcggggtgtgcgcggtagagcgcgccagcgagcccggagcgcggagctgggaggagcagcgagcgccgcgcagaacccgcagcgccggcctggcagggcagctcggaggtgggtgggccgcgccgccagcccgcttgcagggtccccattggccgcctgccggccgccctccgcccaaaaggcggcaaggagccgagaggctgcttcggagtgtgaggaggacagccggaccgagccaacgccggggactttgttccctccgcggaggggactcggcaactcgcagcggcagggtctggggccggcgcctgggagggatctgcgccccccactcactccctagctgtgttcccgccgcgccccggctagtctccggcgctggcgcctatggtcggcctccgacagcgctccggagggaccgggggagctcccaggcgcccgggtgagtagccaggcgcggctccccggtccccccgacccccggcgccagcttttgctttcccagccagggcgcggtggggtttgtccgggcagtgcctcgagcaactgggaaggccaaggcggagggaaacttggcttcggggagaagtgcgatcgcagccgggaggcttccccagccccgcgggccgggtgagaacaggtggcgccggcccgaccaggcgctttgtgtcggggcgcgaggatctggagcgaactgctgcgcctcggtgggccgctcccttccctcccttgctcccccgggcggccgcacgccgggtcggccgggtaacggagagggagtcgccaggaatgtggctctggggactgcctcgctcggggaaggggagagggtggccacggtgttaggagaggcgcgggagccgagaggtggcgcgggggtgccaccgttgccgcaggctggagagagattgctcccagtgaggcgcgtaccgtctgggcgagggcttcattcttccgcggcgtccctggaggtgggaaagctgggtgggcatgtgtgcagagaaaggggaggcggggaggccagtcacttccggagccggttctgatcccaacagaccgcccagcgtttggggacgccgacctcggggtgccgtggtgcccggccccacgcgcgcgcggggctgaggggtcgggggcgtccctggccgcccagctttaacaaagggtgctcctctccaccccgcgaggaggggcagctccggagacccggtcttcagcgagcggggtcttagcgccggggaggtctacttccttttggggttgccattttactattattattgccttttttttttcttcaaaagg

SEQ ID NO: 26 - DNA, 3720 bp, Homo Sapiens
tgcagttgtctatcaaaattttacatatactttggcacacaattacactcgttggaatttatctcacagacacattcacatttatatagtcaaggatgttgactccaacaacattggtataagtaaaaagttggaaactgcctacatgctcatggataggggataaatcgactaactcaaggtcctcccttacaatggagtactatacagccttgaaaaagaatgacaagatctttatgtcaggacatggcacaatctctaagttatttcaagtgaaaaaataataataataataatattgcagaacaatgtgtatggttggatatacataaattcttctgaaagaatacccaagaaacttaaatgtggctacctcaggagctaggaatgaggtaggtggagaggagggacttttacttttcaatttagaatataccctgttgtgctagttgactttcctcctactgttaacaagtattacagtcctttttaatttaaattatttttcctagcacaaatttaaaaaaaaaaaacttaaaatggaaaaacacacaggcgtgagcaaaagaaatgaatggcaataatctctgtggtttactgagtgcgcctggacatttatgtgctctcagtttctctccacaggaaatgcacaggtgagaaactgacgttaagggggactgagtgtcaagctagttagtggcagagggcagattcaaacccaacacggtcctcccctgctgcccctcggcctctgcctccaggtgggaagcgcatctaccggacggtcggcccggtgaggcgcagcgccccagactggcgcatccgcggccccagcgctccacgcctggggagcgcgcgcgcacgcagcggcgcgagcctggcggcggcggcgacaacaacaacgtcacagctcgagctttccttttcggagtccccggcacacatcctgtgtccatgtttgggcatttacgtcacggcggcagggccggggcctcccaaaatggcagtggcccggggagtcggaagcccggagccagcgccgccgcagctatataagtgggggggctgtgggctgggggagcccggcagcgctttggagaggcgaggagccgccgcccgaggccggtgcgggcgagcgagggcgccgcggctccccgactcctttcccagaggtgagtgcccgaagccaggagcccggcgcccataggtctgtgcgctgcggggaacccctaccgccagcctccccgccacccgcgcgcccccaagcccagcgggcgaggccccgggcgccccacagccggcgccgcgccatgctccaccttagcgagttttccgaacccgacgcgctcctcgtcaagtccactgaaggctgttgcgccgaacccagcgctgaattgccccggctgcctgccagggacgctcccgcggccaccggctaccctggaggtaaggagggcgagcaggggtgctcagacgacgacggcgcagcgcgggggcgcaccatacctgagaaccaggagggactgggacattggagctatgagaataggggcgatgggaagcttaggagtcctggggtgcgcacccccattcccacccacactgggccgccagcgcctccgcaggaacctgtgcggttatcggagcgcccttttgcctgtgcacgtgtgttttgcgtgtgcatgtttctatgtgctccttgggacgtatgcgggcccctgctgaatcagaatgtgcaaaaggcactttgtgtatatccgtgggcaccaagagttttgtaggtaggggctgtggactcaggtgcaccctttgatgtgcccagagctgattcctgctccctcctcagcaggcgacttcttgagctgggctttgaacagctgcggcgcaagtggggacttagccgactcctgcttcctggaggggcctgcgcccacaccccctcccggcctcagctacagcggtagcttcttcattcaggcagtgcccgaacacccgcacgacccggaggcactcttcaacctcatgtcgggcgtcttaggcctggcacccttccccggtccagaggcagcagcgtccagatccccgctggatgccccttttcctgcggggtccgatgccttgctgccgggtccgccggacctttactccccggatctgggcgctgcccctttcccagaggcgttctgggaggcctcgccttgcgcgggtgccccctcgcagtgcctgtatgagcctcagctctccccgcccgacgtcaagcccggcctccggcggcctcccgcctcgccagcgctggacgctgtctctgccttcaagggtccctacgcgccctgggagctgctttctgtgggggccccagggaactgtgggtcacagggagactaccaggccgccccggaggctcgttttcccgtaatagggaccaagattgaggacttgctgtccatcagctgccctgcggaactgccggccgtcccagccaacagactctatcccagcggggcctatgacgctttcccgctggccccgggtgacttaggggagggggctgagggcctccctgggctcctgacccctcctagtggggagggagggagtagcggcgacggcggagagtttctggccagtacgcagcctcagctttccccgctgggccttcgcagcgccgccgcggcggacttccctaaacctctggtggcggacatccctggaagcagtggcgtggctgcaccacccgtgccgccgccgccgcccacccctttcccccaggccaaggcgcgacgcaaggggcgccgcggcggcaaatgcagcacgcgctgcttctgcccgcggccgcacgccaaggccttcgcttgcccggtggagagttgtgtgcggagctttgcgcgctccgacgagctcaatcgccacctgcgcatccacacgggccacaaacccttccagtgccgcatctgcctccgcaacttcagccgcagcgaccacctcaccagccacgtgcgcacccacaccggcgagaagccttttgcttgcgacgtgtgcggccgccgcttcgcgcgcagcgatgagaagaaacggcacagcaaggtgcacctcaagcagaaggcgcgcgccgaggagcggctcaagggcctcggcttttactcgctgggcctctccttcgcttctctctgagcaagagatgggtttatgggttggggcgccgccgttcggcgcgcacgagttccgggccgttcccctccccgctcttcttccaactcctcctcgcacgcccgagggccggcctccgtcccgcttccagtttccttgaagcgcccgccgcacacgccctattcagcaccagctcgccggacagttcccgcggtccaggcgctgtcacccttgtcagccgcgctttgggggaagtcttctgagaccacccagtgaataggcactaccctgggattcaagacagtcttttgtaactgcacacgccccacgccttcctctataacccccagagacaggctggggcaggccaaggcggtctcgcgcgggactttgtacagcagtgtcttatccagcagccgattggatgtaacgttttgctttgggttttttttccttttgttgttgttaatttttgtaaagcagacgctactctcaagcagttgacaaaactgtttatttttgcaattaaaattattgtgctaaaagcttactgaatctgccatgtaagctcct

SEQ ID NO: 27 - DNA, 11147 bp, Homo Sapiens
gtggaacacatcctccatatagccacactactcaaaattcactgtctttaagtctttactcaaatgcttctccgtgaagccatccctgagccctctttaaaattgcagccccccactcctgtactccttattgtctctcatttttaatttttgttattgtagttagaaccatctgacacatagcttttattccattggttttttgttatgtctttctttacaagaatttgaagtccatcaggccgggagttttgtttgttgtgtttgctgctatctcccagtgcctaaaattgcctggcatacagtaggcatttaataatctttgaatcagtgaaaaccagatggtggcttggcatttccacataggaatgagccaggtggaaatcatccaggatataagtagatcttgaagtgataaggaagggtcatcataatcatgtggggcccattttgccctttcttgtttcttttctctaggctcagcaacagcctcaccaaggactccatgaatatcaaagcccatatccacatgttgctagaggtgagagcagctcaccccactaccagactctgtgtttagggtggtgacctgaagaaggaagagagcgaaagaagggaaggaccatctttccctctaaactggagtcaagggagggaggtcagagcaagcctgggggcgtaacccagacccagtctttgttcaatctcttctgtcctctttttcaggggcttagagaactacaaggcctgcagaatttcccagagaagcctcaccattgacttcttccccccatcctcagacattaaagagcctgaatgcctttgagtcacatggcccttctttttccccataaaccctgctagttgccacgggggcctgttcctagggcacaaagttactgagagacccagagatccagtctctctgtggaacctccaaaatgccccagcagtcctgcctccagcctgttgcctggcagtatttgccagttgaccttatgcactgccctctcttctgtcatcttggcaacctgggccccccacctcaccctttcttccattccttttcctagacgccaccctttgaattgccatagagaatgggccaattcatggtggaggtttgttcattcccacaacaatcaaagggccctaaggtttacgctttcacacacccaatcattccccaggtaccccaaattacacccaaaccctaactcagccctaccttgtcttagcccctgcttgtaagtgttccagcttccaatgggcacagacctggatcccgctctccctagtcgggcccctattctaggttgagtccagccaccgccaatcaatgcagagccaggttcctcccctttttaactctggccgcagttcaaccctgccctctgaaagcatttcgtttctgccactcaatgctctttcgtgtgcctgacagccatcctgccctcctacctccgctgtgttctaaattcgtctttacccagctctatggtcttgtctaaccgtagagctgccctgcccgcctacgcggagcccagtccgacccactcccgccggctgctacgcccatttctatacaagccctgcttccgctgagcagcatggcgtgcgacaccgcccccttggtgttttggcaggggtctagaagtccctcgtccgccaatcagagaaaaacagggccacccacccccgtccttgggggctgtcttccatcaatcccatgtaagccaatcagtgtgaggcagacccccgcccccccgacacaggccccgagccttttcagttgctcacagtccgtcagtccttgagccaatcggcgtggagcaccgtgaaggccgaacgcgcctcctcgggactccaggggccgtgagcgttccatcatttccccttacgccaatcacggcacagctctgtagggaagggcccgtcccccaacccctcgaggccttgcggccgattaatagcgctttggccaatcagcgagcggcgggacattgggctcctcctcctcgggcccacgtgagctgtagggaaacgcaggggcggcttctaggtgctgccgccgccaccgccaccaccacctccaccgccgcctcggaacccaggcctggggggcggtggggccgcgtatggagcccccgccccccggagctgccaacattgccaacgccaccgccacgctacacacaggtgagctctgggcctggagggtggagggcccagtccgtgaccccacgtatccttcccgcccccgcgcagaggatgtggcttggccggtggcctgctggtgttcgactccccgccgccaccaccacggctggtggacctgcgtgtggcattgctcaagcccttcgtcccttatagtggatctgaccgtggcctaacctccccctcccgttgtataatggatcggtctgcgtgcttatgtttttccccacgccaacttagggtggactcgtccataggctttccccctacccctacccccacccgccccccacccacccccacttatagggagctagcctgtgacagtgttcagcccccttaatagtaggtgtatctgagtgtttggatttctcctagcctcaactttcaggagacccgtccgtggccttatttattccacccttcctgtacatcgtagcgaatcaatccgtggcgccgcactcctccgcatccctctttaacagtgagtctacctgagtttgtattcctgcctcctccagtcccccaatgcatcagtccatggcttttttcaaaaccaccccccccccccaccaccaccaccaccattttatagtggatcagtcttcatgtttggattcacgtccctttagctatcagtccattgccctgtctcctctttttcgtagactgtcgctctagcgcttggggttctctcctttttaatagtgggttagtttagtgctttacatctccctattttcagtagctcagtccatagccttttccctctctgctttgaatcagtctgtgtgatggcttttctctcctctcactgtggtgcaggagtctgtaaggttttctgctccccttcccctcagacgatgagcctcatcacccctccctttgcagtggatctgttcattggccttcctcccccacacccctgtatgcttgcacagtcccccgcataccctcccgtgagtccagtgctttgtaattgggggaagatcggccgtgtactttcaatttccttctctttttttttcccttcccagaagagaacgtgctgatcctcttttccttgtgatggagcactgtacggccttccctgtcctccacctcttaatagtgggtcagcctggtcacactcgtaaccacaaagacgttctgcctcactacaataagtgaatacattagcgccagtgatgatagtaatgccaataggagctagcgtttattgagcacctgccgtatatcaggcagagtgtttcatatgaatgagttcctttaatcctcaccacaaccccatgagataggtagtgagggaattgggccatagggaggttaaattccttactcaaaggtggcccaggaagtactcaggacacaggataatttttgaggctcccctcttagatctcatcccaccccacgtgaggcctcagtccttaaaaaccaaattagttctcacctccaagcttttgttcttgctgttccctctgcctgcagagcagtcttcattcctcaccttctctcagcacccacccaccccccaatcccagcagctgtgtgaccttagatgagtgatttaaccacttcctctctgtgcctttttcttcatttgtgaaatgggggatcagaactagaatcccttccagtgtaaataaatattaactgtgaattaatggtaaaacaagtaacctttctagcattaccgcctataccttcccacccccttactgtgctccaaccacactggttccaccacacagctcctcaaacatagcaggcatgggccagcctcagggcctttgcattggctgttctttgtgccttgaacaccacccccagatctctgcatggttcctttcagcactctgttcaaataccaacccccaaaggatgtttaccacactgtggtgtgtggaatgcagtataaaaagatacatgtatgaaagatgtttctaagaatgccagtttatatatgagtaagggttttcctccttttcaaaaggatgtgttcacaagactgaggtacgtaatatgctctgtaaaggcataggtataaaagctgtttctaagagtgctagttgtatatgtgaataaggactgtgttgttgcattgaaagaatgtgttcacaaaactgtggtgtgtagctgggcacaggggtgtgcacttatagtcccagctactcgggaggctgaggtgggaggatagcttgagcccaggagttccaggccagcctgggcaatatagcgagatccctttttctgaaaaaaaaaaacccaaaaaacaaccactgtggtgtgtgtaatacactctcttaaaggcacaggcgtaaaagatgtttctaagagtgatttgattttgttgtacctgggtagtgttatttcattaaaggttgattgtcacaccatggtacttagaatatactatacaaaggcacatgtataaaaaagaagttcctaacaatgctacttgtaaaaacaaaaaaagtcaacccctccctgaccatctgaagctgcacacccagcagggctcaagccaggtccctgatttgtcccgttgccctttatcactgtctgacacactgtgtgggttacttgtttgttgtctgtctctcctcattagaatgtgagtcccatgaggactcagtttttgtctgctcattcaccgctatgtctccagcaactgaaaatgtaccaggtaaacagcagatgctcaataagaatttatcccatgaataaatgggaaaaagataatttgagacaccagtgtaggggtcacatgaggaagaagaagggatatgagagctaattagttgggactgttcctgcaaccaacctttactgagccccttgtgagtaccaggcactcttctaggtgctggaatatggcaaggaacgaaacagggcgaaatatttgtgcttgtggagctgacatttattaaaagttggggaggctgggcacggtggctaacaccagtaatcctagcactttgggaggctgaggtgggtggattgcctgagctcaggagttcaagaccagcctgggcatcacggtgaaaccccatctctactaaaatacaaaaaaattagctgggtgtggcggcgtgcgcctgtaatcccagttacttgggaggctgaggcaggagaattgcttgaacccaggaggcggaggttgcagtgagccaagattgcaccatgcactccagcatgggtgacagagcgagactctgtctcaaaaaaaaaaaaaaaaaaacccaagctggggagacagactatgtgaacaaaataaataagtaaaattagcataatagacaaatgctgagaagaaataatgaaatagggcaggtaggaatcgagtattgggggtggttgaaatcttaggcatagggaaggtgactcttgaattagggcctcacggtagagacggagagagccttaatgtctacgggaagagcataccaggcagaaggaagtgccagttcagaggccctgaggtgggatggtgcctgccatgttcaaggaacatcaaggcggccagtgtggctggagcagagtgcggggaagggtagaaggtgaggtcacacaggtgatgggagccagatagtgcaggtgatacataggataggattgcaggggcagggggagaaggatgacacactagctaatagctaatatctgtggagtatctgccacacatcagaggcacttttctgttcaaataccaacccccaaaggatgtttaccacacggtggtgcctggaatgcactacaaaaagatacatgtgtcaaagatatttctaagaatgccagtttatatatgaataaggattttcctccttttcaaaaggatatgttcacaaaactgaggtatgtaatatgctctatggaggcacaggtataaaagctgtttctaagagtgctagttgtatatgtgaataaggactgtgttgttgcattgaaagaatgtgttcacaaaactgtggtgtatagctgggcacagaggctgaggtgggaggatcacttgagcccaggagttccaggccagcctgtgcaacatagtgagatccccgtctccgaaaaaaaacccaaaaaataaccactgtggtgtgcataatacactctcctaaaggcacaggcataaaagatgtttctaagagtgatttgattttctggcacctgggtagtgttatttcagtaaatattcattgttaaacactatggtgcttggaatatactatacaaaggcacatgtataaaaaagaagttcctaacaatgctacttgtaaaaacaaaaaaaaaagtcaacccctcaagtcttttacagaagtattttacagaattgacacagttaatcctcacagaagccttggagggtaggtgtacttttgagaatatttgactttgagagtaaaatatccccattttacagatgaggaaacaagcaaagagaggctgagtaacttgctcagggtaaccttgagccagaatagccagaacaggggcagaggaacataaggctgaagactcagaaagaagaacagatttgcaagggcaggcaggttatttggcacctttgatcacgcagaggaagaatgaattcttcctggaatgcgatgattgtgtaattgagtccatgaagtgagggaagagctctccctgcggggagagcagcccgtgcttaccctcagaggttggaactgtctcgggaacggtagatagttcagggtggctgcctcagagcctttgtacacgccgttcgctccgcctgaaggccctcccccacagagggcagcctggcttgctacctcccctccttcaggccaggtgtcacttccttggggaagaactccttgtacaccctgtgtaaaaacagcattcctgtcactctctaggatcttacccttctctgtttctcttcatggagaactggtggtgtaaggcgattgctcactagagccaaaccacttaggttttgaattccggctctgccaacttccagctgtgtgacttggggcaggttacttctctgtacctccattgcctcatgtggaaaatgggggaaatgataatccccaccctttaacggtggtttgaggattcaatgagttaaatgattcaaagagtgtgcagcccacggtaaggatcgtatgcctggcttgcatttttaaattattaaaatgtattcatagcatacccgtagatgtctgacaggcctctgaaactgaccatctccaaaactggtgtgacccccctcaaaacttactctcctgcaaggctcccacctcagctgaccacaatgctgtctttgtgggtgattaggccacaaacctagactcaccctggacccttctctcacctcccccgggcatgctatctgtcagcaagtcctattctgtgttcaggctttctccagaccccagctacttctcgccagccccactgctaccaccatcatctaccgcagtggcttcttcagccccaacagtctgttcttctcacaaccgccagggggatcctgttgaaatctcagtcacagcctgtcatccctctgttcacaaccctcttgtggctcctgtctcactcaacatcctgacagcacccgaaaaagcctggctcagtctggcccccgtcactctgttctcctctcccgctgcctccctcctctcccccgaacccatgtcagcctcctctccccatgtcacctgccaggcactctccagccttgggcccttcacaccggctgccgcttccacctggcttgctgctctcagatactcacgagctcagttccttcacctccttttggtctctgcccagttgtcccctccttggcgactactctcccctgactctccatgtaaaagtaacagctctcccctgcttgatttttttcccataacccttaccaccatctgacgcactcttgtacatgtttgccttttttctcatctgcctttcctgctaagatgtgagctcctctggagcagggattgttgtctgttgcgttctcgactgtatccgcagcacctggcccacagtatgcactcaccaaatgcttgctaagtgaaggagatggaaagaagtaaacatatctaagcaaggcagattactagaactcttatgaggggtcaagtgggagaaataacaaaatacaaagccctgtgtgctgttgaagctggaagcccaccgtcacctttcactcagctgataggttctgttgcagctgaaagaagaactggtaaaattgcctgtctttgccaccaggagtcactctgaactctttggacttctgaaacaagcctgcctgcaaaacaaattcagtgaggtctctggtgacaggactctctaatcggacacttcatggctttgtgacttgtataattgaacaggaagctcatgtttatttccagtttgctctcaggaaagaaagcagtaatggggtgacagggaggatcctgttctttgaaggacatgctgagagggaatagtcggtgtgaggggccgtttagcctaatggtgaaatgcttagtcaactggaacctgactgcctggctccaaatgctggctttgccacatgtggcctgtggaaggtacgtagacatttgtgcctccgctgcctcatttataagttaatgacaggaagactacctacttctcagaggcatgatcagggataaataagtcaatgcccattaaaaaaaaaaataacagtacaggtgtacatgcccttacccaaaacccctggggccagatgtgtttcagaatttccatttcttcacatttcagaaaggtaacatgatgcatatacgatgttacataacaccccttagtaagctctgtaatcggctgtgttcatatttctgcagcaaaatgtatgaacactcgcaataagtgagattcaataaagaccagaaagggccttgtttcatttcaaatcaggttttgccaccaaaagagttaaaagaagctttctgcccttagagcattttggatgttggaatggcagataagggactatgaacaaatcagaaactaatatttagagcttatcatacacctcaggcatataatatttaatctgtacaatatctctgtgaactaggtattgttatccccattttactaatgggcatatcattatccctgttttacacatgagaaaattgaggtacaaagaggttaaagaatatcagccaagcgtggtgcctcatgcctgtaatcctagcactttaggaggccagggagagaggattgcttgagcccaggagttcaagaacagcctgggcaacatagtgagaccccatttcttaaaaaaagaaaaagaatatgcccagggtcacacagctaataagtggcagaaccaggattcaaacactggcaatctggccctagtgcctgggcagttgtccagcaggccatattgcctctctgcttagaagagtgcctgatgtgtattaagctctcaatagatgttaattattgctgtcatcaagaaagagaatattcagggccgagcacggtatctcacacctgtaatcctagcactttgggaagccaaggtgggaggtgggtggatcacttgaggtcaggagttcaagaccagtctggccaacatggtgaaaccatgtctctactaaaaatacaaaaattagccgggcgtggtcgtgggtacctgtaatcccagctatgcgggaggctgaggcatgagaatcgcttgaacctgggaggcagaggttgcagtgagtcaagattgtgccactatactgcgctccagcctgggcaacagagagagactccatctcaaaaaaaaagaaaaaaaaaaaaagaacgagaacattcagggacagtaacaggacagagagatcaggcattcattcagttttaggacggcttcataaaggaaaggacctttgggctgggacttgaaagataagaaagactgctaggcgaaagaaggaagccccacgtggagtgagcagcctttgcaagggtctggcaaaaaaaaaacctcctgaaaaacttgacattgatatggtagaagatacagataatattcaaatgaggaggatggaactagttttctattcttgctgtaacaaataatcacaaatttagctgcttaaaacaacacatttgttatcttacagttctgtaggtcagaagtcccacactggtctcagctgaaatcaaggtattggcagggttgcgttccttctggaggctctaggggaaaatccatttcctgctcattcaagttgttggcagaatccaattccttgagattgtaggactgaagtccctgtttccttactgtctgtcagctgacagccattcccagctttaagaggctgcccacagtccttgattctgagcctccttcctccatcttcaaagccaacaatggcaggttgagtccctctcacattttgaatctcccctgcctcttctgtcatcacatctctgagctacctttctttctccatcatctgcttttcagagctcatatgattagattgaatttcatcaaataatccagaaataatctccctgtcttagggtttgtaaccttaatttcatctgcaaagttcctttctgctatgtagtgtaaataacatacaggttccgaggattaggatgcggagcagggttggcatcatttggcctaccacagtctgccctctgacccccacagattcacatttgtttcacattcaaaatacattcacaccatcctaagatacccatgagttgtatcccatcacagggagcatcccaagcaagactggggagctagaagttagtctgggaaggtttagggaatgatggtagggtttgaagacagagatggagaaaagatgacaaaaaaaggaatcctcctcccgctgacctctgcccctcctatgtccacagcctctcaactcagctgtttgctctccagg

SEQ ID NO: 28 - DNA, 3814 bp, Homo Sapiens
cccctcactccccactgccattcatccagcgctgtgcagtagcccagctgcgtgtctgccgggaggggctgccaagtgccctgcctactggctgcttcccgaatccctgccattccacgcacaaacacatccacacactctctctgcctagttcacacactgagccactcgcacatgcgagcacattccttccttccttctcactctctcggcccttgacttctacaagcccatggaacatttctggaaagacgttcttgatccagcagggtaggcttgttttgatttctctctctgtagctttagcattttgagaaagcaacttacctttctggctagtgtctgtatcctagcagggagatgaggattgctgttctccatgggggtatgtgtgtgtctcctttttctttcaggacttgtaggattctttgtgccatttgcatataatttggcaggttcacattttttaagagccctatgaagtgctttttgcatgtgttttaaaaaggcatttgaaaattgaaagtgtgatttatggaaattaaatcatctgtaaaaaattgctttggaaagtaatgattgctggccataaagggaaatatctgcgatgcacctaatgtgtttttaaccctttatttgctgacaatctatagtcattaatgctaaactcgattttggcttcagctacatttgcatattgtccaacaatggtctatttttgtaagaattagataaaatgtatacttgatataaaatagtcaaaaatgtaactcttagtaacagtaagcttggcatttagatagaccatgaacacttcgtcagatactctgttgggtgtttgggatagcaattaaaacaaagtattgatagttgtatcagagtctattaggctgcagcaaaggaagtttattcaaaagtataaactatccaagattatagacgcatgatatacttcacctattttttgtctccttaatatgtatatatatatatatatatatatatatacacatatatgtgtgtgtgtatgtgcgtgtgcatgtttaacttttaattcagttaaaaacttttttctatttgtttttcatctggatatttgattctgcatatcctagcccaagtgaaccgagaagatcgagttgtaggactaaaggatagacatgcagaaatgcattttaaaaatctgttagctggaccagaccgacaatgtaacataattgccaaagctttggttcgtgacctgaggttatgtttggtatgaaaaggtcacattttatattcagttttctgaagttttggttgcataaccaacctgtggaaggcatgaacacccatgtgcgccctaaccaaaggtttttctgaatcatccttcacatgagaattcctaatgggaccaagtacagtactgtggtccaacataaacacacaagtcaggctgagagaatctcagaaggttgtggaagggtctatctactttgggagcattttgcagaggaagaaactgaggtcctggcaggttgcattctcctgatggcaaaatgcagctcttcctatatgtataccctgaatctccgcccccttcccctcagatgccccctgtcagttcccccagctgctaaatatagctgtctgtggctggctgcgtatgcaaccgcacaccccattctatctgccctatctcggttacagtgtagtcctccccagggtcatcctatgtacacactacgtatttctagccaacgaggagggggaatcaaacagaaagagagacaaacagagatatatcggagtctggcacggggcacataaggcagcacattagagaaagccggcccctggatccgtctttcgcgtttattttaagcccagtcttccctgggccacctttagcagatcctcgtgcgcccccgccccctggccgtgaaactcagcctctatccagcagcgacgacaagtaaagtaaagttcagggaagctgctctttgggatcgctccaaatcgagttgtgcctggagtgatgtttaagccaatgtcagggcaaggcaacagtccctggccgtcctccagcacctttgtaatgcatatgagctcgggagaccagtacttaaagttggaggcccgggagcccaggagctggcggagggcgttcgtcctgggactgcacttgctcccgtcgggtcgcccggcttcaccggacccgcaggctcccggggcagggccggggccagagctcgcgtgtcggcgggacatgcgctgcgtcgcctctaacctcgggctgtgctctttttccaggtggcccgccggtttctgagccttctgccctgcggggacacggtctgcaccctgcccgcggccacggaccatgaccatgaccctccacaccaaagcatctgggatggccctactgcatcagatccaagggaacgagctggagcccctgaaccgtccgcagctcaagatccccctggagcggcccctgggcgaggtgtacctggacagcagcaagcccgccgtgtacaactaccccgagggcgccgcctacgagttcaacgccgcggccgccgccaacgcgcaggtctacggtcagaccggcctcccctacggccccgggtctgaggctgcggcgttcggctccaacggcctggggggtttccccccactcaacagcgtgtctccgagcccgctgatgctactgcacccgccgccgcagctgtcgcctttcctgcagccccacggccagcaggtgccctactacctggagaacgagcccagcggctacacggtgcgcgaggccggcccgccggcattctacaggtacccgcgcccgcgccgcccgtcggggtggccgccgcgcccggcaggagggagggagggagggagggagaagggagagcctagggagctgcgggagccgcgggacgcgcgacccgagggtgcgcgcagggagcccggggcgcgcggcccagcccgggggttctgcgtgcagcccgcgctgcgttcagagtcaagttctctcgccgggcagctgaaaaaaacgtactctccacccacttaccgtccgtgcgagaggcagacccgaaagcccgggcttcctaacaaaacacacgttggaaaaccagacaaagcagcagttatttgtgggggaaaacacctccaggcaaataaacacggggcgctttgagtcacttgggaaggtctcgctcttggcatttaaagttgggggtgtttggagttagcagagctcagcagagttttatttatccttttaatgtttttgtttaatgtgctccccaaatttcctttcatctagactatttgattggaaatatgtcagctatgatgatgactttctgggaagcgattcctgtcacccgctttcccctcctccccaccccacgtcctggggctttagagagcgattgggagttgaatgggtctgatttcggagttagctggctgagtccgcgctggagcggattgctggcatgtgacttctgacagccggaaatttgtaggtgtcccgcgagtttaaaacaagccatatggaagcacaagtgcttaaaaataatctcctgccagcccagtgacaagcctgtcccacccggggagaatgccccggagtggcgtgcgggtcagccagggtctgcgcctcgcagccactgtggaaggagcgcggccggtccaggacacaggagaccactttgtgacttcaatggcgaaggttgtgtgtcctcattttaatttttttccctacaagaattgttctttctccctctcctctccctcccattttctcttgcccagtttctccttt

SEQ ID NO: 29 - DNA, 3050 bp, Homo Sapiens
atgtgtgtttttccgtttccctccctttttatgagtgagaaaaaaaagcgcctaaattcccaccaacataaaccaatgacatacaatgatgaaattctgttttcacctctgcctgtgacagggaatgcaaaaatagcaagtggcccagttccacgaatccccgcctcctgccctccccgctcctgccgggttggatctctaagaatggaggttagcgcacagcctcgcgcgggccgctcagcccccggacccggcggatgatgtcaggcgacgggagcggccgcggccgggccggggaggccgcggcccaggggagctgggagggagggtggcctcgccaggccgacggcgcgcccggccgcgcggcgttgcctggagacggccctggcggcgctgtgttgctgtaaacagccgcttccctgttactatctatagcaggatctcctggctcccgggcgcggcggctggaggcaggtctgcggtccggctccccgcgcgccccgaactatccgcccgccggcctcatcctgcctcgcccctctccaggtgcccaccgcgggccccgacccccgggcccgaagagtggagaagggaagaccggggctgtgcggggacatgcgtcttcgcgccctggaggtggccagcgcgctggggctgagccccggcagcgtgaccccggctgtcctacgcagcagggcaggagattggggggcgtggcacactctggagcaccttgcctccccaaagccccgtgttccaggacgtggagccgctcctggggtcccagcagtcgaggtattccgcccaggcgcagctggacactgtccttccagcccccgtcctccaccctccaagtccgcgctggaaaatcacccgctgcgggctcccgtaagcacagcttcctggcgggaccgaaccagccctcagcgcagatttgagttccccgcaggaagcacaccccgccttgtcatcccgaactgaccaccctgcccacataaccacacctcgcactccctacccctggggcccagctcagaaccgggcagacacccccttcaaatgtcttcgcacgtaggttttgcacagtgtttatctgctggtgtctcagggatttgacagtttccttaatattcccacacatggccgagaaaaataaataaataaatgcgctgtcttctttaaaaaaataaataaataaagtacccagtatcgtaaagtaggttatcgtattctcttattttggatcctccactttctgcttccaaacgcaggaacagtgctagtattgctcgagcccgagggctggaggttaggggatgaaggtctgcttccacgctttgcactgaattagggctagaattggggatgggggtaggggcgcattccttcgggagccgaggcttaagtcctcggggtcctgtactcgatgccgtttctcctatctctgagcctcagaactgtcttcagtttccgtacaagggtaaaaaggcgctctctgccccatcccccccgacctcgggaacaagggtccgcattgaaccaggtgcgaatgttctctctcattctgcgccgttcccgcctcccctcccccagccgcggcccccgcctccccccgcactgcaccctcggtgttggctgcagcccgcgagcagttcccgtcaatccctccccccttacacaggatgtccatattaggacatctgcgtcagcaggtttccacggcctttccctgtagccctggggggagccatccccgaaacccctcatcttggggggcccacgagacctctgagacaggaactgcgaaatgctcacgagattaggacacgcgccaaggcgggggcagggagctgcgagcgctggggacgcagccgggcggccgcagaagcgcccaggcccgcgcgccacccctctggcgccaccgtggttgagcccgtgacgtttacactcattcataaaacgcttgttataaaagcagtggctgcggcgcctcgtactccaaccgcatctgcagcgagcatctgagaagccaagactgagccggcggccgcggcgcagcgaacgagcagtgaccgtgctcctacccagctctgctccacagcgcccacctgtctccgcccctcggcccctcgcccggctttgcctaaccgccacgatgatgttctcgggcttcaacgcagactacgaggcgtcatcctcccgctgcagcagcgcgtccccggccggggatagcctctcttactaccactcacccgcagactccttctccagcatgggctcgcctgtcaacgcgcaggtaaggctggcttcccgtcgccgcggggccgggggcttggggtcgcggaggaggagacaccgggcgggacgctccagtagatgagtagggggctcccttgtgcctggagggaggctgccgtggccggagcggtgccggctcgggggctcgggacttgctctgagcgcacgcacgcttgccatagtaagaattggttcccccttcgggaggcaggttcgttctgagcaacctctggtctgcactccaggacggatctctgacattagctggagcagacgtgtcccaagcacaaactcgctaactagagcctggcttctccggggaggtggcagaaagcggcaatcccccctcccccggcagcctggagcacggaggagggatgagggaggagggtgcagcgggcgggtgtgtaaggcagtttcattgataaaaagcgagttcattctggagactccggagcggcgcctgcgtcagcgcagacgtcagggatatttataacaaaccccctttcaagcaagtgatgctgaagggataacgggaacgcagcggcaggatggaagagacaggcactgcgctgcggaatgcctgggaggaaaagggggagacctttcatccaggatgagggacatttaagatgaaatgtccgtggcaggatcgtttctcttcactgctgcatgcggcactgggaactcgccccacctgtgtccggaacctgctcgctcacgtcggctttccccttctgttttgttctagg

SEQ ID NO: 30 - DNA, 2312 bp, Homo Sapiens
tgctggaggggtgccccgggagttacatgcccgtttcccatcagtaaccgtgcaattacgctcaccgggtgtgagcctttctccctccttcccccaggagagcgcgcccttcgccgttataggcagcaacacggtggtggaggccaaggggcagcgggtccggggccgactgtacccctgggggatcgtggagggtgagtagagtcttggggtaccaggtctggtgggggaaggctgtcctgggccggcgccagcccactacccacccccaccccgcagtggagaaccaggcgcattgcgacttcgtgaagctgcgcaacatgctcatccgcacgcatatgcacgacctcaaggacgtgacgtgcgacgtgcactacgagaactaccgcgcgcactgcatccagcagatgaccaggtgcgcgccccagccgcgagccagacctcgcccctctggccccgcccacgtctccataactgagggccggtcctgtcagcccacccagacttgaactttgcaccattccctaagccccccccctcccccagagcctggtctccctagaaccaagtccagggctgtgagggctccggagggcagggcctcagcagtggcggggatgggccaggcatcgccagcccacgctgagcctcccggtggcgccgccccgcccatcctcccccccgccccgcgcagcaaactgacccaggacagccgcatggagagccccatcccgatcctgccgctgcccaccccggacgccgagactgagaagcttatcaggatgaaggatgaggaagtatgtggggcggcgggggcggcggaggcgggcgtcagggatgctcctccgcggtgctgctcacccgccgggttgtctccgcccgcagctgaggcgcatgcaggagatgctgcagaggatgaagcagcagatgcaggaccagtgacgctcgccgcggacacaccgtccgtctccgggacgccctcgcacccctggacaccagaccggactgttcccgacccggagacgcggggccacagcccccagctgaccctaatttattctcagcaccaccccctcccaggtcattgtgtctgtttccgaggggcctggaccgtagcccccgcccagctggccctctctgaccttgggggatcaggagcgaagttgggcgggacttcagagatccgcctcccttgcccttcccccgcccccggacggtcacagcacccaaaccgcaggccctgctctggcaggcaggcaaagctaggcagaagaggattcccaggatcctgggtctgttccctgccccagtgctgcagaacggacttgggagccctcctttgcctgctcccgcgggtcacccagcgagtgctgagaccccattttctgtcgaggcgggccgagtcttcccttatccccagacgcctagcgggcagggttgggctgaatcaaatgggagccctccagacataaggaggccagaggctgcaaggagcggggtcgtgaccgcttacaccccttctccacagcccggcccgacctggagggcccccggggcactgggcggtgagccacctcctggcaactctcggtgccgtcccctgccctcgctcgaggcctcttctccccagcaccgctgtggtgtgccgggatcctgagcctaggcctcccgatgttcccacccgcatgatcccttcccgccacacgatgctccgttttcttccgttgtgaatgccgcgtcctgtcctggtgacaggagaacaatgttggtgaacgtcgcagcgggtgtccgagtgctccgtgtgcccctgagagcgggtgggagcggaagcctgagcggcctgcggcctccggcgatagtgtgctatctgccgctgcagcgcgcgtccgcgcggcctctgggctatttctggccaggccgcagcactgtggtcggtgcgggcgtggcaggggcggggcggccttatcgctcggctctcccgcctacgcctcccgctgcagagtaagccgggctgccgtcttctcgccatgggctccggtgagtctggagtccggtcgggcccccggctgctccctaggccgacccgggttgagaggagctctggtcgtttggctgcagctgggagagacttgggtcagacttagaggggacttccagccggcgtgcggggtggtcagggtggagaggctggcgggctaccgggacgccgggcatcaggggctggatggagccgggccggcagtctgggtactcagagatgtcgcccaggtgcccgccgaccgctcggcttactgcggcgcttcccttgcagg

SEQ ID NO: 31 - DNA, 19634 bp, Homo Sapiens
tctgctaaaaatacaaaaaaaattagccgggcatggtggcgggtgcctgtagtctcagctacttgggaggctgaggcaggagaatcgcttgaacccggggaggcggaggttgcagtgagtcgagatcgcaccactgcactccagcctgggcgacacagcaagactctgtttaaaaaaaaaattcagaatgtgtttatttcttcctctatcattttctcttcattaatttgtctattttattagctatgccctgacagttttgacagggttgtgggatatagtagaaaggttggaaaggcatggacagccgtgctgggagtgctgttcgagtaattttctgcctccagtcatttcccactacttcatcaaatacaactacctcactatgctctgggtggtacgaagtaacccatggtaggatgcttcccaactcagtgttaaaggtaatggtgcatcctgagctttctcgctctgcatctcaatcctggaactggtaattctctatgactgacacctctgagctcccattctctcctatctctagggaatacctgaggaggtgaggtttcaccttcttactccccgcggcccaacccccgtccgcccctcccccgccccgcccctcgccccccagagctgagacctgggcatgcgcatcagccgcaacagattggaggggaccctgctgctcactcccctgctaccctcctctcttccctcccccgaccgctctcatattcccgttcccacccccaccccccactcccgccccgcacccgcccctagcccgggctcggggacctgtcaggctggtttcgacagctggggaattaacctgtcccgcccatccctagcctcgagccgcgcaggctccgcgcctccgcccttgttccctcccagctcctccgagtggaagccgctacaaatggcttgaatgaaacgtgtgtgggtttagtgagtggtgaaccaccaggggatcccgtctccccacaaaccagtatctctccgaggaggaggcgaaggagtgggaggaggcaacgagccgagagtcgagcttcgcgggcgcgcgcagcggctggagcgcgggggcgaggccgggccacctccccttcccggccgcgcactgcctggcccgcggcggttccaggcaccacccttcccgtccgggctgagcccgctgtggcagtgactagctcccgcggctagcggcactgtccaccgacgagcggcgccctcttctcccccttctccccacgatttccttctctgcggcggcacgccgtccagcagcctgcttcgccccgtcgtcaactttgagctggaggagaagcaactttggcagtggccgcggggttggaatcccgcttctcctcggcagcagtaggctcgcaagtcgctggggttaggtggggcaagagtttcgccggcgcatcagcgctgcttcggactgtttgcaacgtgtttccagcgagctgggagcggggttgtgactgcgagtcgtctgggggagggggacttgtttttcttttcctctagagacctcggcttgcaactggatcaaacgctgtcgaaaggatgtaaataggcagagcaactgttaccaagaaggccaccacccccacccaaaggcagtgaggagtgtggggcttcgtctgggctcccccgagtctcaacagtaatcaacagtcaggtgttgattgcaacttttcaaggtcagccaccgggagtagcctattccctctaggaaccttggagggcataccttgctgggactcaacttggctgagaaatgcacaagatgccaaaggaggaaggattatagggggcgtgtgtgtgacccccaagaccgatcttccgctatcaccctaatctccggttccccgctacccgggcgggggtgagtatgtgacatgtgcctaactctcagcagcaacttcggcagcaggtgtcgatcctaactaagcaggagctgcggctgccgggtgtgccctcaccaagccatgcgagccccgggcgcgcttctcgcccgcatgtcgcggctactgcttctgctactgctcaaggtgtctgcctcttctgccctcggggtcgcccctgcgtccagaaacgaaacttgtctgggggagagctgtgcacctacagtgatccagcgccgcggcagggacgcctggggaccgggaaattctgcaagagacgttctgcgagcccgagcacccagggaggagcagggggcagcgtttcttgcgggaccctcctgggacctgccggcggccccgggccgtgacccggctgcaggcagaggggcggaggcgtcggcagccggacccccgggacctccaaccaggccacctggcccctggaggtggaaaggtgctcggggtcaggagccttctgaaactttggggagagggaaccccacggccctccagctcttccttcagatctcagaggaggaagagaagggtcccagaggcgctggcatttccgggcgtagccaggagcagagtgtgaagacagtccccggagccagcgatcttttttactggccaaggagagccgggaaactccagggttcccaccacaagcccctgtccaagacggccaatggactggcggggcacgaagggtggacaattgcactcccgggccgggcgctggcccagaatggatccttgggtgaaggaatccatgagcctgggggtccccgccggggaaacagcacgaaccggcgtgtgagactgaagaaccccttctacccgctgacccaggagtcctatggagcctacgcggtcatgtgtctgtccgtggtgatcttcgggaccggcatcattggcaacctggcggtgatgtgcatcgtgtgccacaactactacatgcggagcatctccaactccctcttggccaacctggccttctgggactttctcatcatcttcttctgccttccgctggtcatcttccacgagctgaccaagaagtggctgctggaggacttctcctgcaagatcgtgccctatatagaggtaatgccttccaggggctctcaagctagtggctttatctgttttcgggattatagcatcagagaactgctgctggatgcacctatctagctgaacgcctttcctttttatctggggccctctttcatttctctttccaatcatttatgcatgtatgtatatacaaaaagaggcagcttcgcgaaatcaccttcaaattcatctgctcctgggctgtaaaaaaaggatgatctcacaatatacagaattgtttggagtataaatctatctccctgaatatggtgttatgcgtatttctgatttggcacttgtcagagattttagggttaagtaaatggccagcctaaggttgtcatcatcagagcctacaaggaaaaaaaaaaaaacattagcatttgtgtactagttaccaagtgcttcaatgtgagttttcccccaagaagattattgcattttttcttaaacagcaaagttggagtaacattttattgaaagaaagaaagaaagaaaattgtgtttgtcagttggcctcatgatatattaataacctctcaaattagtttaagtgtctgactgtcttccatgctatcccatctaaattcttaagtcattttttgttcctgtcttttcccatctcggtttcttaattttatttttgtgtgtttgcgtgaacttaagcaaaaataagactttggccagcgtggcacataatttgtttaacattctcaaagttatacatttgttatttgttatgggtggaaagattggctattttaagggattgaccctaagactagaaaatttcttgggaagaagggggcacatctagtttccaaactttggaaacaaaaatcattttgagtgaaattgcattgtttcatcctacagctagtgtcctggcccactattgtggtaggtggactttgctctttaaatggcctctctttaaacaccagctcttggaaggggcccaactgttttgctgccagttgtgtttttagccagctggcccttgattttctccattcagactgtccatttcatttatggaagcagaagaagggaaactgtaaatattccgcagcccctgatcctgtctggcaccagggcctgtgacactatgttcaacattgttccaggcctaaagctgggggataagtaaacagaaaacagtacctacttagacggaccaaagctggagacagtaaataagaccctctgttatcttgacagggatcaggtgcaggatcattccatgactatgaaatcagctgttgctgctttagcagcgtccatgatttctcctgttgccaagcttggcgtatctctgaaacatctactttgtttggtagacaattcatttttgaattgtgaaggagccagttgaactcatgttagagaatatgtgtctatttaccaaactgcctcttcaaggtcagtttcaaatttctttttttctttttttttttttatcagaagaaattgacttatgcaagaaagagacaaaagtataaagcggacaagagaggtacctcaatgacagagaagtgtattggcttatctcactggaaatgtactggacatgtagaaatctgtatacactagagggaaaaacaataggacagaaaaaggaaattggggaaagaaaaataaaaacaccaaagttcttgaaagaacaccttaaaagaaaagaatatcaaattcaggaaagattataaaaactttggttaatttaatgagatataagcattttgagcaatggcatttattatgtacttattttaattttctttttccgtaattctgagtttgtacaaatgtaatactttctttcatttgtatttcactttttaatttaatcagctcctccttaagagtgctttgttttttgcctcttattattagtaaaatcttttactttctgtatttttgcttaacttttccccatcctagtagctttctctatttttcagttattagtgctagcatttatttttcttagagaatcaaaggcttaaaaaattcactcatttattttttaaaattacagtataatatacatttttactgttaaaatagtgaatgaacatcttaatatgtagcatttctatatttctacctaatccttattactctgaaataattttagaatggtttataaaaataattattggacaatattgctggcttcataattcctgattactgagaacaagaactacagtccaaatctcaaaataaaagtgtgtctccaggaggcactgatgttttcacaaaagtaagaggtatttagggtttctcctacgttgggttcctgcaaaaacaggccctgagatgtagatttattggggcatcaagtttattgggttgtgctctcaggttcaacctattaaggaaagaagaaagcaggattgggcgggcaaagggagaagttgaactgtgatgcaattgccacagagacctcagctgacaccattaggagctttagggctgggatggccatgcagccatatcccaaattgaggcaagagggctcagcctttacatctctttatggaccagtcattagatgtaagacattggatgcaagcctgctcccaggatggggtataaccttgagttgggtggatctctttggtcaagggcaattcctagagagggatgcagctaagcactgtcaaccaatagccccagcagctggaggaatcagtgcttcattcttgaaggactttggagggagctgtctgggtggaaaaccacagcatccactacagtagctttttttttttttttttttttgagacggagtcttgctctgtcaccaggctggagtgcagtggcacgatctcagctcactgcaacctctgcttcaggggttcaagctattctgcctcagcctcccaagtaactgggactacgggtgcgtgtcaccacacccggctaattttttttgtatttttagtagagatgggctttcaccatgttggccaggatggtcttgatctcctgaccttgtgatctgcccacctctgcgtcccaaagttctgggattacaggcgtgagccaccacgcccagcttacagtagcttttgaacaatcatgttaaatcagacatagataatgttctaatccaactccctcattttaaagatgaaatttgaagctcagagactatcctaaacatatatacctggtcagtagccaccagacccttggtctcaatgcttcatgtttatatttgctgattagaccaacctgtatgaagcacaagctttatccagtgagtgttttcttttcctttccgctccttggcatctgaaaaattttttctttttttaatccactagacaggaaaaaataaaaacccgtaaacatcatttgttatataatgaaatgtatagcttcttttgtttctcataaactgtcagtaagttctgcaattggtagttaattaaaattttttaaattgcagtaatctgagacaactatactttttaatttgcctagcatgatgactttaatgaccaaaaagttatataggttaaattttatgttcttaaaatcatgaagtatgttagattggtgaaggacattacaagtacattacatttgttcaaactttctccaaatccccttccaaaattttgcctctgacctcaagacttttaaaaattttttgacatcttgtctactttcatatttctaaattttgccattccttcacttgttactttcttattttatttcttggctatttttcctttctttaactatgtataataccttcttatagatttatgatgtagcattcaccattttccagtaagatgtttaacctttttcagtgtttttatttttaattttttcgtagttaattttaaattttattctcaatagattatgattgaattttataatttttctctcccagcttctcttttgctttatttttcttttctaccacagttctttctcctgtacagcttgagcgttagcataatctgaagggaatcgtgggattttggggaagatttgggtttgtgtagaaaaatatgaggtacttcttgagtaaaaactatactttttctaattttcattcaactcctctttctattttaatttgttggcctaaagcttgaggatagcacccagcttccaaggtctattgtgagaaaggaagttttatgatgtttaatattgccgtgagtgagaatgttctgggaactgttgtagttgatgacttttccctttctattccaggattatgacatctttatggcctaataataaatctcataaagtcgaaggacaaatgaaatggtaggaaatgccagataggagagaagaaaatttggatagatcatggccgtcctcctagacacatcagtttaaagtggtttattacttagccacaagaaaaaaactatactcaaaacaaaacttgtatatgtagtgtgcttttatgtgtattaggggaggtggagatatgtgtgggtgtggattgcaataggagaatggcagaggagttctctaccatacctaccattcacttaggaatctaacaagtgtttaaaaccaaataatttgggccaggtgtggtggcacacccctgtaatctcagcactttgggaggcctatgcaggcagattgcttaagcccaggagttcaagatcagcctggccaacagggcgaaactccatctttacaaaaaatacaaaaattaacgggatgtggtggtgcatgcctgtagtcccaaccattcaggaggctggggtaggaggatttctggagccttggaggttgaagctgcagtgatccatgatcatgccactgcattccagcctaggtgacagagtgggaccctgtctcaaaaaaaaaaaaaaaaaattcaaataattcagacatcaaatatggcaactggaatgaatctttgctcattatttaatggaagtcagaatcaaggtatcatctgaccgagatcccagataacagattaaggtctgtttggacattaattggaggttttgaatgatcgagattctctttagtttaaagaacccacaccttcatggagtgttgtagaacagaaggcttcaaataattataatgagataaccccagatctaactgtatttttattttactgggataaaactcctgcacagaggtggagagagaataaagggaacatgtcttaccatggcctctggtctgggaataatttgtgacaagtctagaatcttttctaatgagaggaaccagcttctccaatgactttagcaatactggttttaagttgagtggaacaaatggctctttcattgccttagattgtagctagcactgacaagaaagaaagggtttttggaggttgaagatgacagtgccatacaactatctgagtctacacagatttccctagaacgcctgtattcaagtaatagaacatttatcatggcatatggtaaattttctttgagaggtggattagtcattaggtattctgccggacttttaagtggaaacttactgttttatgagcaattttaaagttactaatagtattcttagggaaaatgtgctcaatatatgagaatggtgctgaacaaatattttatgacttcccattaatcttttagtaatcattttatatattcccatgcaaatgaaaatatttagctgatgactctaacaggaagaaaagtgtttcttagagtgcacttttatttataactccatttctgaatggtgtatggtgaagttaactgaatttggatcttccacaagaaagaaaagttttataatattcaaataagaaatccaaatagtttccttttccattgatcataatgagaatgtgtccttttctaaagcttgtcaatgaagtataaataggaaaattgattttttaacttcccttctatagatattgtctggcattcagcttttaaggattatatataaaacagcagcacccaataactgattaaagaacaatttgaataatttattattttctgtaatccttttccataggtgtcatcattcgttcatttgttcaccattcattgatttatcaaatgtttacctggcttttcttctatgcgaggtactattaggagtgggcaggagaaggcaatacaggaagagggggaaaagtttccaaagatgaatatcatagatgagccactgccattaaaattacagaaaagtaaagtaatgttctacaccatgatgaatattataatagaggtttgaacaaagcatcgtggaagctcagaaatggcactgaaatgggtcaagtcacagttgtgcttgttatgaccagagatggagaaattaaagggaaaactgtgctccctctaattcttttcagttacattcttactattaatcttcataaatttcataaatgcctatacagcctagatccatgatgaaaagttacaaatgtgaaaatcttttaattcttgcttttttgtttcctttagctttcccaggatagaaagtccataataataattggcaaaataattcagcaaatagttcagttctagaaatttcttttaaaatatggaatttgtgccagtgcctaggatatctatctctgctttacaattagtccttattagctataaggacactaaatacgtcaaaattaaacattttatttaaatgaatggcttatttggcaatgtaataacagtatattaaattgagtccttttcttctgaaaaaatcaaaacatatacaaattgtttaacttgaccttggagaacctaagaaagaagatggacaagggcgatactttagactccattgtggagtcgaggaaaggggagcacgatgaatggactttctcaagaattggattaatctctcaagcacataatcagagtgaagatttattctgagctcctgagggctcccaaggtatcctgccatgtcagcaaagtatccttccacagagacaaggaggcaaatgtgtctgcagaagtaaaacagatatgagcttataagtttaccgaaggctgagtgggtgagggtctacctttgctttcatatttaggctgcatggaccttgatacaatttttacacctttaatggcattcgtcttatgtgcggcaaccttttaacagtatcccattggaagcacatggacctgtgtctgggatgtagattgtgggagagggatgggaaggcagctatgcagtgcagtttgtctctgcctctgcacttctgctccatcctccagggatgcgcctgtcatttcacttcccatgaattgacctgccaaggtccaataatgaactcaaccttgttgccaagactaactcttaaatatcctaattggaataatactctttgtgccagaagagatgatctcatccaaaatttcagagtggagttgagaatgggattactgcaacgtcaaatatggagggtctttttttatttgcagagtaagtgtaggtacttttcataaacttccataaaacgcaggatatgatcactgtgtcagtcttgttcttgagacagaatactttccatttgtgaatttgtaatagttttcagtgttatctgtctgtacacttgaatagttcatagcattcattaatgaggccaaggtcattgatttgatccctgcctagaatgagacattcttattaggtctgtgactctattcagggatgttacttttttctttttttctgtcaaaatagccccttcctcatcaattcccatcttcagggcctatctttactattgtcttcctaattcaaatcctttttatatcggaaaagcatctgataagccaattcgcatcaagatatgcaatttagaaataactgccttttataagaagattgaatcaagaaagaaatttccttaacagactaccaatagtgaaattttggttaaaagcagataaattctgtcctaaaatatggtttctcaattttattaaaatcatgatgacctaactatacataattttgtttttagtttgagttcacagtcatgcaaatcaatatcattagtcagaaagggaaataggtaaaaatgtgttactgctttttggaaactcatcagaaccccaaggtaaggaactgaaattccaggtcactttaagattgactaggaacatcataataataccaaagattgagaactggactgtgggcttgggggaaatattacattttgaaatgattttgtaattactgagaataaacatggaatctttagaatctaacatagatggtttatatcttaagacaaaatgttgctaatcttgcttcatttacatttttattttaataaacacctgacagattgataggaattataacatgttaggttgtagttaaatgaatttttttaaccatataaggaatgtactgtgctatagacatcataattggtaacaaaccttaattcaagataggactataaaggaaaagaggatttatggaatcaagacaagttttgggagaatatgttgatttttaaatagtcttaaacggcttttaaaataaggaaagcgtggtatcaagcttaggcaaaagaagagaaggtggagaatgaggcagtaaggacagttgatagttgatgctttcaaaatatttttcccccacggcattgggaatcacatgtaaatggaatagtctgagtatattagaaataaatggttatttattatatgtgggcatatcagactaaatatcagttgataaggataagaagtcttctctttgactgtggaacagtggctgccagagctctgtttcattccagagagtgcacaagcagtgtgtgcatgaatgtaaggggtgaggaaagtctctccttctctgcttttggtttagaaatgctaatcgaagtgtgtcactgccatagtatcatgatctgcatacactccaaaattaagaccttttgcaaaaggtcatcttattcagagcagtctgataaacagtggctctgataaacttgttcccccacttgtgctcaaaaaagtatctcccactgctgccctgaaatgctgcaaggacaaggataatggaaaaatgcaagaagaagccaaaggcatagaagctccagccatttagaggttctaccctgtgctcatcctgttcttttcctgactggttgttaggcctgtaaccactgacataataggttatcattcacagcccaaatgaatgggttttcttaacaataatgcccttgttttgagggttacttgtaaacaaaggacagcacataaatagatgtacttaaagattttttatgtaaaatataagccagcctagaatgcagttaacaagaacttggttagaaattttcctattttataaaaaccagtgtattctagtcacttcactgtacttgagcatgtagattcaatttcataggaaggaaattttgcttaggacactgtttcgttttttcttttcccatcggtgttatcactgatttgtaccggaaagttttgcgaaagacacaatttactttatgatttgtattttatgggctctgtgttgtctacttcacgtcttactctcatttttaatcttttttaacttgtctgcagttagcttctgagaaatgcagcagtagctaagacaggatctctgtagattactggttttcataaagcacccatgggctctttcttcatatcattttgaatgaacagagatttaatgtagcacaaagtggctatggtagcccaggttcctcaggtcctgatagttgctttaaattagaaacttgagcagtgggaaaaatgaaatctagttatatcttgacttataaagcatgctttttaccttttattaagtattttgccttataagtttctttctgtttgtattattttttttaagagaaacctagggaaacatgggacttgaaattactggaaagagcgatacatttttttcttactttatcaagagatagtttcactctgaatctttccccaaagtcattgttgtcatgtaacttactgaccgggttaatttctcatcggggtataaagtagctgtcttaagttggacagcataggtgctgaaccaaaatttgggactcacgatctcataaatacatgtttaacagagggacaaaatatttgaaagctgaggtatatttatggttctcataactaccaagttgggtttctctaaattcagtcttgccagtggtgataagggactagatgaggacccgtatcatttccatgcaggtgactgtatttgtactccttcattatcctaaccaaactacctgttttttgttggtttctttctgtaacaaaatttaaaaggtaactcaagaagccactcacaaaaacttccattatattttcaaaatcctccatactttataggttttttttttccactttgtggtagactttcatagtgtatcatatcagcatccacaattaggggagaaatacatattaccttgctccttattaagaaaactgaggcaaggagaaaatgagaactaatctgtcagagtactgaatgtcgcttgaatattgaacatctggaatgtcacttgaaatatctggatcattaaattgagccaattgcatcttaactgtaattaggaataaacctttttagatgacttcaaaatggagttttgttagttagaaaaacattcaaaatatagaatataataaaattattttatgagtgttttaagcccttagtattcattctccagtatcttataaatctccaaatgagcaaatattgtaatagcataaattttacccctaaaattatcattataagagaaaatttatctattatctctatattatcatttaagagaaaacttaagaaacccatccaaactttaaatgatttatttaatgattttctaaatgactaaagtaacatataaagctaatggcaatccttcctgggctatttttttttcctacacaggagcaaacttttacaactttacaagggttactatgtatgtcaagagcaacaaagagtacatttagacatgaattctgggtggtcttcaagttctctttcctttttgtaccatccttgtatcccacggatttaaatagatacttcagttaaaatacaaatcatgactgtactgcattgttaataaacagtcaaactgacaatcacaaggttatcctagtctaatagactaagtaggacatagatgatatttgcaaagaattggatcatatctcttgaaatgcagctatacatcaggagaggttttataatttggtcagcctgtaaagttagttagacatctgtagcaatttccctaggagatactgtgaaattatgtttgtcttccaatcttgttaaactagtgattctcaactgcagtctccaggcaaacatggatatgtcccagatcaaggggagtcacagtgagcatgccagaaactgttagtcaatcctctctgcctagtagactgtaatgagtgattccatatgtaaagcaacttgctggctgcatggtagcaggtgggagatagtcgagaagttctgtcatagattccagacctcttgaggataaaattcctgctttattcatcattgttcccagcagcagctacagtatattttatagattctctctctttctctcttaaaaacaagacacacacacatatagcattgtgctaatgcagtggtctctttgctagtaatacagtgttcaataaaggcataataatgggaacagtttaggggtgatcaagaagaatgaccctaaacccctcactttggtgtccaaagcctcactgctccacatgtgggctgggtgggagctgaaggagctttattgttgttactctgggacacaaagaaaagcagaacattgttgtttgaaagatcttagagttgtttattttgattcctttccatctctgtattctaatgccaatcctctcaaaatgctcaatatcttattttccccaatagttaaaattttgtttctattttcccgctgatcttgaaattatcaaaattaatagtcttgtctctgaaaagtgtttacagttctgcttttgttgctgttaattattcctcccattgcagtttaattaataagagattgcatcttactcattcagtctctcaggatgttgcttcaaagaactacccatctaagccaatgcttaacagctttactcctgagagcatatttcatggtgatattgaattttagcaatcagatatggtcattaaatgcagaagatctggcgttcatgatgcagttttataattgcacataattgcactattcatcttagaatttttaataagctgcatgtaaacaagtatatttcaaaattgtgatagaaatcttttcatgttgctccaatatctaggaattttaattacatggatagatttcatgtttgggtaagaagaaattagaacgccactcattattcatatgatttttatcaattaatttctgaggtgtgcagttactactttacacatatttaaagcctcctataaataatttggaaaagtactgacagggcctttgtacatttcttgctctttcacaccataaaatgtagtgcgtaagtgaatttacagaaaaaagatctgaagtaatatcactgcaggcagtggcagcaggagagagtagatgtctaggactggcatttgggatgcagttgccaagagcaactgcatcccaagcgctagctgcatttggagcagtgctactttctttggctccttcagcaactttctctgttgctcttgtgacccttctggactgtttaccctgttgcagctggatcctaactgcagagagtactatcagagaaaagttcaatttgaaaacagaagcctggatgtaggagctttttgaaatttgtatatgaaaactggggaggattccttaattcatgatttatcaaaaagactacagatcatgtatgtttgagcttttgacttggtactaaagcttttgggaatatgactgaagaactgagcatcctcagataaaacacagtgtagaattcctgatgataagttggaatacatgtaaatcttgcttaacatttgtcctggcttttgttgtcttatgagattgaaggtaaagaacctggaaaaacattgttttgctttcttaggcagttaacatcttctaattaagagcggatgtgcagcacagcttctgatatctaaggagttggtaatctaacacacccatcttaatacatgtccaccggcatgcatttgccattacctttcattaaagactttgtaactcctggagttaggtatgcagttactagcatatgtgataattgatccatattttttcaatctgtggatttaaaactagggagattaatagagaagatgctatcttttgtgcattgtgtgttctttgcaagtaatgatagaaaaccaccaagcaaatagatgttctgagcctctaaaagattgcctctcctcagagtctccagtatttttatattactgagctttccttttaatagaaatcctatttgtgatttcaaaaggatgtatagcataaactttggaagccttgtatttgtggactcattcgggctataaagtgacggggaagcatgcacaaagatttgccttagtgaagatggcacgaaagccttgacgagggtttctgatagtttaagaagttttgttttgtttttgacagacttaggagaaatgaatcaaaacatttgaaaaactaatatacaaatgtcaagtttcaaaaatctataaactaaggtactgtaatttctacatgatactgtttgatatagaattttaggaagtggccagccgttcttagatgtctttattaagtggcaattactggcattttaaaacatgatcataagacagttgtacaatgtggacctcatttttagaattattttgtgcctctagcatagacgcaaaacaaattttcatcaatgtgaacaatttttaatttgaaggttaattattaaaagatgaaagtggagattattttttgtcatttgcagtcatattaggttgatgtttcatatgccaatgtttatgggagacattctgaaaaatttggagaataagaattgtggttatcagcccaattgtgcctctttatctgcactgactagagctttgctagccatattttttttttcatttttgcttttaatatagttaacacctcattatacctcattttcagactgtctccactactagttatgagagtagtcagggcataaatacaatgtccttattttccatattagaactagtagatgccgtctgatatgtagtgtataaggaggaaatatttgacattggaactgtcagaatccccaaggcaagttgccgtagctctggggagagtgacagcttgaatgtagtagataaacaactaatgttttgagtactaaaattgtatgacaaatggtttcccttttgtcaacatcatccctttgacttttaaaaaatgagatattaacattatacttacatttcccctgcccctttaccagggaatagcctataaccatgcttcttaaaccttcctaccagcaggcaggggagagcaaaagcttatattcaagttgtctgggatgtagaccaaagcattccatccacccagggagttttcttttagtctcatattttatctgaaacgttattaacattttaccttctactcattgttcttgtttaaatatataaataatgactacatttattacatattaaattacttaaaatttccccagaatatttaagtaggtttaatattgccaggtgattgctgtgtttatgttgtaactttgagaaccatcgtccccatcttggttgactatgatatgcttgagggaagggactgcttcttgtaactttctattttctcgataccaagcatagtgctcggcatagagttgatataaataaatgtgtgcttgtgttggatatgtatctgtttgccccatttgagtacatgtacaatgcttaataaatattttataagtaaatgaaatgatagcatgcttacattaggaacatgtgtttatattcctggagagcctctatgtgaaaaaaaaataggtacatatttttggttcttaacctttaaatgttgatttttttagatgtctggaccatatgcttataagagcagtgcctttttgaatacagtttttcatgtggttattgtcaaagagttttatgctccaaaattttcctgtgtttgggatatctagacattctttttggctattttctgcatattttcttgtatttttacatgttctattttagtatctcctatttctttaaatttgatgtacatacctattttatgataaatatacttcttatgtctgattctgtatctttggcatataaattcatagtggctcattgtctcttgcatattgtgacttttgattttgtgaacccatgtcccttgaattttaactataggattttttgaggcctggttttaaagtgcattcttccagagaggatttatgtttgattttaaccaggtgcctgggattattttaaattgtattttgggttttctgagccacgtagatcctggaaattctgatcctaacaccatgtaagttcaggctcccagttagaatttgccatttttttccctccttttcccccagttcatccagacccaaaccctgtcatccaggcagatttcttcattatctctctctcttttttccctttacacctctaaagatgtcagcatttgaggagttccaaattcacagggagtctttgacccaatccccacccacattggccccagctctgtttcctgtctctgtgcacctgggcaccttgccccatttttctagctaaaactaacttgaaaccctcaccaggattggcaggtgcccctagggcaaacacgcagcatgaagagggaggggtctctggcctgtttgaaatttgtttcctttttgattttggcctctggagaatttccctttcttgttttccgtaagtgtatgcctttgaaaataatactgtaatactttattttgcatttaggaaaaattggaggagccctccaatcatttagtccattggagacaataagctcttgagtgtttgctgtgtgtaaggcacactactgaccctcacactggaaaacatgagcatcctggtcagcaatgaaaatgggaatttctgcactaccctgactccttatctagatctcctagtggcagacattttcgtggtgaataaaatttttagtgtatctgggttctgatctataataaaaagggattggactagctgatctttatggatccttccagtcctaaatgttctgcactccatgaccctcaaaccactacagtgtgttttctttttttatgcttacaatgattcagctgacgtcctgagcccagttacccatgcctcattctggaaaactgttctctctctctctctcatttttatttatccatatttttttttacagttttgccaatctgcatttatttcctagtgctttgatctttcgggggacaccgggaataaatgtcttctatgttcccccacagg

SEQ ID NO: 32 - DNA, 3128 bp, Homo Sapiens
gaggggagccttggcgcgtcagaattagctgcgcccgccgagagcctcctgtgggtggggagagccctccacccctctgctcgcttgagcgctcagagcccagggccgccgaccgcagcactttccgatttgctgcaccgaggcccgcggtccctgtgtgcggtttccaccgttgttggaggcggccgcaggcgaaccgtcgggtcgtcagccacgacccgagtcaggcatctccccgctcctgggaccggggccgaaggccaatcacactgcagctaggtcttgcgattggacggcagtgagagccgattggccgccgccgcgagtttcgggctccctccctctcccttttgccccaactccagcgcctaagcttcaggccaatgagacagcgctttatagacgccctcccttcgctttcttctccccaccttggagagggaggggaagtcctgactggccagactgtcctcggaagcccccttctcttcaccaatcaccgaaggaggtacgctcccagcggagttttccagccaatcacaaagcggcggcggcgcccagccgtgcagtttcaccagcgtctctgggtttcaccgtcctcaactcttcaagcctcttcgtaagggccggcgactctgattggccactgttgccattgtcgaatgtctcctccagccagccaccgaacaaggcgaattcaccctttccgttcggctaccttcggcattttccgctctttgggcgtggcttcccagcgtcactttctaattggtttctcaggctgatcggctttttccgggaggagccgcaaacaaacgacgtccgtgattggctccgttcggacttcggctcccagccgaagcgggcgagcgtggggctcggccggcgattcccagacgcctgttacgcgggcggcggggcgctgggcggtgtaaggctgggtgggggaggaaggaggtggaggacgagtaggaggggggaggaggagtggggaagtgcaaggcgcgtcggcagacagcgctcctcacacagagcagctcctgacccgggcgaatgcgggctttgtgccgccgccgccgccgccgccgcccgggccaagtgacaaaggaaggaaggaagcgaggaggagccggccccgcagccgctgacagggctctgggctggggcaaagcgcggacacttcctgagcgggcaccgagcagagccgaggggcgggagggcggccgagctgttgccgcggacgggggagggggccccgagggacggaagcggttgccgggttcccatgtccccggcgaatggggaacagtcgaggagccgctgcctggggtctgaagggagctgcctccgccaccgccatggccgctggatccagccgccgcctgcagctgctcctggcgcaatgaggagaggagccgccgccaccgccaccgcccgcctctgactgactcgcgactccgccgccctctagttcgccgggcccctgccgtcagcccgccggatcccgcggcttgccggagctgcagcgtttcccgtcgcatctccgagccaccccctccctccctctccctccctcctacccatccccctttctcttcaagcgtgagactcgtgatccttccgccgcttcccttcttcattgactcggaaaaaaaatccccgaggaaaatataatattcgaagtactcattttcaatcaagtatttgcccccgtttcacgtgatacatatttttttaggatttgccctctcttttctctcctcccaggaaagggaggggaaagaattgtattttttcccaagtcctaaatcatctatatgttaaatatccgtgccgatctgtcttgaaggagaaatatatcgcttgttttgttttttatagtatacaaaaggagtgaaaagccaagaggacgaagtctttttctttttcttctgtgggagaacttaatgctgcatttatcgttaacctaacaccccaacataaagacaaaaggaagaaaaggaggaaggaaggaaaaggtgattcgcgaagagagtgatcatgtcagggcggcccagaaccacctcctttgcggagagctgcaagccggtgcagcagccttcagcttttggcagcatgaaagttagcagtgagtattggttttattttacaccccttttccacctcgcccttaaaataagaaacctcgaaataccaggatctgaaattattagacctcctgataaacaggcaatggaaaagggcaaaacctatcttcagtcaaggatgaagcagctccctttttactcctcccataccccctcccccggtctcattaaccttgaattgagataatatgatatttatttggatgattcgatttcaaactgctttcttgtacttttcttgctgttggtagtcagtttcatcaagtgctcgagtgtttccacgttaaagtagtgatgacagtgtttacttgcccatcctttagaataaagagaaggacaagatttgattactaaaccattatgcacatttgcagaatttttggaatttggaatgagagaatattttaggtctcaggggttatcatagtttgatatacttaatagagacgttaaatgtcccaccctcccaacatttttttcttgtttgtatgactacacataatatttgttcttaatctgtggatgaacttcctcagtaaccattcacatttggaggctgccattgatttctctctttagaagggactagtgggagccaataaatacctagcagcagtaacatctctgtatgcatttgtgttcaattggataagtggtttgatgtgttatctcttaaccttcctgttttgacattaccaacctgccaccgtataatttatgtttaatcaaaagttaacttggaagtattaataggtccaagttttgattgagatttgttttgtcatagtgccaaatactaagttaaatgttgtcactggctcattacatttaagttcaattttggagtgctactgcattcattacctgttaaatgttctggcgggttccttaaaaaggacgatttaaaacactctagcgttagtttccatcatatttagataactgtggatttagttagaagaatgtggatttagtcctttc

SEQ ID NO: 33 - DNA, 3030 bp, Homo Sapiens
tctttgaaaattgctaataaaaactcgctggttttacggctcagggggcatcacggaacctgcggacatgtgatgtctcccctggacacccggctttaaaatgtctctcttttgtactctttccctttatttctcaggccagccgacacttagggaaaataggaaaggacccacgtgaaatattgggggctgaatttcccccgataataagtctcttaaaaaagacttttaaatgaaatttctttgttttttaacttttatttctgttttgggggtacatgtgaaggtttgttacataagtaaactcgtgtcttcggtgtttgttgtacagaatatttcatcacccaggtattatgccgagtacccaatagttctcttttctgctcctctccttcctcccatcctgcaccctggagtcaaccacagtgtctgttgtttccttgtttgtgttataagttctcatcatttagctcccacttacaagtgagaacatccagtatttggatttctgttcctgcattagtttgctaaggataatagcctctagctccatccatgtcccacaaaagacatgatctagttctttttaatggctgcattaaatgaagttttaaagatacaacataaacaccaacctcttccccaccacaaaaatcccttgctgaatttgattacacttaaattaacgagttttgtttcatgaaagactccttggacaaacttgacagttgatggaataggagaagctgtctgtcatgtctaaagccaacaagagatcaatatctagaataaatggagatctgcaaatcaacagaaagtaggcagcaaagccaaagaaaatagcctaaggcacagccactaaaaggaacgtgatcatgtcctttgcagggacatgggtggagctggaagccgttagcctcagcaaactcacacaggaacagaaaaccagcgagaccgcatggtctcacttataagtgggagctgaacaatgagaacacatggtcacatggcggcgatcaacacacactggtgcctgttgagcggggtgctggggagggagagtaccaggaagaatagctaagggatactgggcttaatacctgggtgatgggatgatctgtacagcaaaccatcatggcgcacacacctatgtaacaaacctgcacatcctctacatgtaccccagaacttcaaataaaagttggacggccaggcgtggtggctcacgcctgtaatcccagcactcttgggaagccgaggcgtgcagatcacctaaggtcaggagttcgagaccagcccggccaacatggtgaaaccccgtctctactaaaaatacaaaaatcagccagatgtggcacgccacctataattccacctactcgggaggctgaagcagaattgcttgaacccgagagcggaggttgcagtgagccgccgagatcgcgccactgcactccagcctgggccacagcgtgagactacgtcataaaataaaataaaataacacaaaataaaataaaataaaataaaataaaataaaataaaataaaataaaataaaaaaataaaataaaataaaataaaataaaataaagcaatttcctttcctctaagcggcctccacccctctcccctgccctgtgaagcgggtgtgcaagctccgggatcgcagcggtcttagggaatttccccccgcgatgtcccggcgcgccagttcgctgcgcacacttcgctgcggtcctcttcctgctgtctgtttactccctaggccccgctgggacctgggaaagagggaaaggcttccccggccagctgcgcggcgactccggggactccagggcgcccctctgcggccgacgcccggggtgcagcggccgccggggctggggccggcgggagtccgcgggaccctccagaagagcggccggcgccgtgactcagcactggggcggagcggggcgggaccacccttataaggctcggaggccgcgaggcttcgctggagtttcgccgccgcagtcttcgccaccagtgagtacgcgcggcccgcgtccccggggatggggctcagagctcccagcatggggccaacccgcagcatcaggcccgggctcccggcaggctcctcgcccacctcgagacccgggacgggggcctaggggacccaggacgtccccagtgccgttagcggctttcagggggcccggagcgcctcggggagggatgggaccccgggggcggggagggggggcagactgcgctcaccgcgccttggcatcctcccccgggctccagcaaacttttctttgttcgctgcagtgccgccctacaccgtggtctatttcccagttcgaggtaggagcatgtgtctggcagggaagggaggcaggggctggggctgcagcccacagcccctcgcccacccggagagatccgaacccccttatccctccgtcgtgtggcttttaccccgggcctccttcctgttccccgcctctcccgccatgcctgctccccgccccagtgttgtgtgaaatcttcggaggaacctgtttccctgttccctccctgcactcctgacccctccccgggttgctgcgaggcggagtcggcccggtccccacatctcgtacttctccctccccgcagccgcggccctgcgcatgctgctggcagatcagggccagagctggaaggaggaggtggtgaccgtggagacgtggcaggagggctcactcaaagcctcctgcgtaagtgaccatgcccgggcaaggggagggggtgctgggccttagggggctgtgactaggatcgggggacgcccaagctcagtgcccctccctgagccatgcctcccccaacagctatacgggcagctccccaagttccaggacggagacctcaccctgtaccagtccaataccatcctgcgtcacctgggccgcacccttggtgagtcttgaacctccaagtccagggcaggcatgggcaagcctctgcccccggagcccttttgtttaaatcagctgcc

SEQ ID NO: 34 - DNA, 1631 bp, Homo Sapiens
ggatccagaacatggggcggactcaggcagcggcgggaatcaggcggactcgtttggaccgaagcctccgccaggcaccgaagccgtgaagtcgcctgcgcagcaaagggagcctccggggggcgcccgagaccttggtgtcgctcgggggccgctggtagccgcgcccgctgcccctcgcccggtgactcagccggtacctctggcggggccatgggggccagaggacagcgcggggggcggcgagcgcggttgctaagctctccaaggcctcggagggacaggatctgggcgcacctcaccggttgccatggtaacgcagcgccccagcccctcgcgctccgcggtggagggaggcgcagccaatcggaagcggcggagttctcggggacccccccccccccgctccacgccgtgtgtgggcgggggtcaggaggtgcggggcggaggcggagcgtgggccgcggagatccggcgttcgcaggaggcttggtgcgcggcggggctgcacggggccacttccggagtagtactgcgagcagcggcgcgacagtgcggggtcccctttctcccagaagagacgtcacccacacaaacctgaccttcacgtggggcgcgggaccttgcggggtcccagccgcaggcgcccctgttgtttccttcgggcgggtgggttggagaagaagtccacgcgggattcttcaaaacggcgtacagggggattctagggccccatggttacttctttggaccccccggaggcgctgtccagccacttccagtcgccctgatgactcgtcgtgggttcctttaggagacccgaaagttcagggcgggctgtgtgggtaacacctctgcccaggttcccggagggccctacgtggctgcccctggagtatcccagagcgctagggctgcgggaaggggcgggtgtgcttctggaaacatgagcgcctgttagtatcagtgcctggatagggctggggacaaatcagtttatgccgcgcacaccgaatccatgcgcctgagtgagggtgggtgtgttggggagtgcgtccaagtggacagtgccgtacagtaatgtctacggggagttccaggagagctcggctactcctgcgcaggataacctctcccccaccacccgagtcccgtgctcgcgggcaggacttttccgaactggggctgtgtgcctagaaatacgtacatgggagcgctcagctcaaagccccagggtttctgggactcgcgtgtccggggtcggggtcccaggtgggtacaggtgggagggcgaacctgcgggtagggtgggcccctccccgcgggctcagcatctgtgcgcctccagctcaggtgcgcgggaggaaggcagcggcctgccgcgcagagccctgcgcgcccgcgaggtggcgccatagccgcagcagcgcccgccggcccgggccgctccagataagagtgtgcggaaagcgcggcggggctgagacgcgaccaggacgcggggaggacggaccagcaggacagaccgaccgggggcccggcgggcggagggcagcgcagccacgtcccccctggatccgccgtcagccgggcccggggctttcgacatgccccccaggtgggtcctcgag

SEQ ID NO: 35 - DNA, 3523 bp, Homo Sapiens
ccttgccctcgcctgttccccaacttttctccccgcctgctcccatctgggggcttccgcagcttcaggggagcccggagctttgcaagcgtctgtgcatttatttcttacaaaacaaaacaaaacaaaacaaaacaaaacaaaacaaaacaaaacaaaacctcacacacagccaataccagcggtggagcggggcgcactgcacacacccagtcccgctccacaaggatgcccaaaccggctccggagttctggggtgcgccctgaatgcgtctggggctcctgtgctagtgtctctgagctccccgacctcgggacgcggggctgctggggaggaaagagccctgggccgagccccgtttcgtgtctgggcgtctctgcctaagtccctcgccagtaagtcccgaagggcatcatcaaatcatctctggccagtggaaagagggggtctaagagctggagcccggccttgtcgcggcctcccaagccgcctcccagaacaggaaggaagctcgaggaacaaagggggccccaacagagcccagtctctcggtcccgcgtgtgcaaccgtcagtggaagagaagcagcctcagccgaggcgagttaacctgggcgcgggtggaacattacagcccggggtaggctcccggctccggattcccgctcccagcctccgatagcgcccgcgtcgccgccacagcagcgttcaggacccaacgaggggcccagggccatgggagccgccagagtcctggcttccagacgtgccaggggcgcctgcaacgccgggcctccagcggggagactccacttgcctctcagctatatttgtgatttacttgagtctttcggagccgtggaaaataactacagagatactaggcactgccaaggaatgcttccattatcgccctcattttactcctggaggtctaagcaagaccccagtaacccgccccacggatccccagaccccaggcagcctctgtggctgcagggagcctgggcccactcgctgggttcaaggagaaccctccgacttggggcccggctggctcgaggaaccggaccctgtgatgaagattttccaggctggatacgtaagcaaatcaaatcgcaaactaatgacacgaaaaccatattcacacgaaagaaaaatcgactacggttataaaagtgtatggaatttgacctcgccttggagaaacactacacaaaagctatctttaatagacgcctgtcatttaagagcggcagggacactgtccctcatgcgctcgcaaaaacagagccgtaattgtagctgctgctgctgcgggcaggatttatttctccaattggctaaatggctttcccccttccccgaaggtgatatctgtattttcaaaattcagagctgctggcaggacggtcagtaccgaccccaacctcgacacaaaaataagaggggctgcaaaacgggggaaataaagttgttgtaaataaaatgcaagtcaccacctccccccaatcctctgcatcctcgccgggcgcgcgatcggcagctgacggcctaacaattggtacatcctaatggaactgcgagggaaatgcaataattttgccataatgggctgtaacctcaattcgaccccggcccttgcagcccccggtcggaagctgggcgatgagccctgcctccagcgggtggcgctcgagtccggctgaacggcggcaactggcggcgggcacgcgcccggggcgcgcgcgccacccccctcgcctccacccaactcccctattagtgcacgagtttacctctagaggtcatcaggcaggatttacgactggacaacaaaagcacgtgattcgaagtcgtaccccatatttgggtgcctacgtaggagggaaccaagtacatgtcccagtcatttccataattcatcataaattgtgcaagggtgctatagacgcacaaacgaccgcgagccacaaatcaagcacacatatcaaaaaacaaatgagctcttattttgtaaactcattttgcggtcgctatccaaatggcccggactaccagttgcataattatggagatcatagttccgtgagcgagcaattcagggactcggcgagcatgcactccggcaggtacggctacggctacaatggcatggatctcagcgtcggccgctcgggctccggccactttggctccggagagcgcgcccgcagctacgctgccagcgccagcgcggcgcccgccgagcccaggtacagccagccggccacgtccacgcactctcctcagcccgatccgctgccctgctccgccgtggccccctcgcccggcagcgacagccaccacggcgggaaaaactccctaagcaactccagcggcgcctcggccgacgccggcagcacccacatcagcagcagagagggggttggcacggcgtccggagccgaggaggacgcccctgccagcagcgagcaggcgagtgcgcagagcgagccgagcccggcgccgcccgcccaaccccagatctacccctggatgcgcaagctgcacataagtcatggtaaagccagcctttttctaaatccacgcgaccgcggggacgcggctctcggtcccccctctcttctctgccgccctctcccagtctctcttggtctcatttctcccagccctgcggagctctccttgccgttctccctcccctgccttcctccttcctcctcttctttgcgagcaccctgcgctcacaaatagtgggggaaatgggcgttctctgggacagtttagacgttggaagggggaggaagcaaaaaacccctctggaaccccacgccttgggacgcgctcccgggtcaggccagccgagcaaggcgcagagaggtagaggatggctgtagcagccgtgaatcgggcttgtcacggcggataatttatgaggagggctacgctggggaaacagcgttactaattacagcccccgaaaaggggcttgggggaaagaatcgaggcgagagcctgcaggattctgaattttgggggcaggagggagagagaaggaaagggaagaaaaagaaaacaggctccccaaccctgcaggctggaaacgggaggcggctctcggggctggaactttgagggagggtgacccgaaggccacttgggcgctcaggaaagggccttgcttcctgggtttctgtgcggtgggcagcctgggagggctgtgcctcccgatcggggcgcccggggcagggcggagggggcaggagaggggccagggaaagccggagtccgccgggacacggccccagcctcagatgggcagattgttcccagggtccaaatcgtattgttttctttctagaaaggaagagagaaggaaattcgggaggggtgtgcgggctggtaggcagaacttgttgagcttttcgcctgggttccctgctcatgacccaagcttgtccccctggcggactttggaagacaggagttggtggctaaaccgctgacttttctattgcaga

SEQ ID NO: 36 - DNA, 5244 bp, Homo Sapiens
tggcgctcgtctccggctgccgccggggaggccggcgtggggcgcgggacacggctgcggacttgcggctggcggctgcgctcgctcctgctgggcgccccgaaatccgcgccactttcgtttgctcattgcaaagatctcattcgtggggaaagcggctggagggtcccaaagtggggcgggcagggggctggggcgagggacgcggaggagaggcgctcccgccgggcggtaaagtgcctctagcccgcgggcctaggactccgccgggaggcgcgcgcggagcgcgggcgaagtgattgatggcggagcgaggggggcgaggggggccaggggggcgcgagattccgccggcggccccttccccttggctaggcttaggcggcggggggctggcggggtgcgggattttgtgcgtggtttttgacttggtaaaaatcacagtgctttcttacatcgttcaaactctccaggagatggtttccccagacccccaaattatcgtggtggcccccgagaccgaactcgcgtctatgcaagtccaacgcactgaggacggggtaaccattatccagatattttgggtgggccgcaaaggcgagctacttagacgcaccccggtgagctcggccatgcaggtaggatttgagctgtgtttcccgccctgatcctctctcctctggcggccggagcctccgtaggctccaagcctggcccagattcggcccggcgcagccggccttccgcgcgtcccgcacctggcgggggctccggggctccggcgcggcaccggggggcgctcgggatctggctgaggctccaagcgccgcgtggccggctccttctgctggggcaggtggcggctgcgcgccccgcccgagcccaggggccccctcagccgcaacaaccagcaaggaccccccgactcagccccaagccacctgcatctgcactcagacggggcgcacccgcagtgcagcctcctggtggggcgctgggagcccgcctgcccctgcctgcccggagaccccagctcacgagcacaggccgcccgggcaccccagaaacccgggatggggcccctgaattctctagaacgggcattcagcatggccttggcgctctgcggctccctgccccccacccagcctcgcccccgcgcaccccccagcccctgcgaccgccgcccccccccccggggccccagggcccccagcccgcaccccccgccccgctcttggctcgggttgcgggggcgggccgggggcggggcgagggctccgcgggcgcccattggcgcgggcgcgaggccagcgaggcccgcgcgggccctgggccgcgggctggcgcgactataagagccgggcgtgggcgcccgcagttcgcctgctctccggcggagctgcgtgaggcccggccggccccggccccccccttccggccgcccccgcctcctggcccacgcctgcccgcgctctgcccaccagcgcctccatcgggcaaggcggccccgcgtcgacgccgcccgctgcctcgctgctgactcccgtcccgggcgccgtccgcggggtcgcgctccgccgggcctgcggattccccgccgcctcctcttcatctacctcaactccccccatccccgcttcgcccgaggaggcggttccccccgcaggcagtccggctcgcaggccgccggcgttgtcaccccccccgcgctccccctccagccctccccccggcgcgcagcctcgggccgctcccctttccgcgctgcgtcccggagcggccccggtgccgccaccgcctgtccccctcccgaggcccgggctcgcgacggcagagggctccgtcggcccaaaccgagctgggcgcccgcggtccgggtgcagcctccactccgccccccagtcaccgcctcccccggcccctcgacgtggcgcccttccctccgcttctctgtgctccccgcgcccctcttggcgtctggccccggcccccgctctttctcccgcaaccttcccttcgctccctcccgtcccccccagctcctagcctccgactccctccccccctcacgcccgccctctcgccttcgccgaaccaaagtggattaattacacgctttctgtttctctccgtgctgttctctcccgctgtgcgcctgcccgcctctcgctgtcctctctccccctcgccctctcttcggcccccccctttcacgttcactctgtctctcccactatctctgcccccctctatccttgatacaacagctgacctcatttcccgataccttttcccccccgaaaagtacaacatctggcccgccccagcccgaagacagcccgtcctccctggacaatcagacgaattctccccccccccccaaaaaaaagccatccccccgctctgccccgtcgcacattcggcccccgcgactcggccagagcggcgctggcagaggagtgtccggcaggagggccaacgcccgctgttcggtttgcgacacgcagcagggaggtgggcggcagcgtcgccggcttccaggtaagcggcgtgtgcgggccgggccggggccggggctggggcggcgcgggcttgcgccggacgcccggcccttcctccgcccgctcccggcccggggcctgcggggctcggcggggcggctgagcccgggggggaggaggaggaggaggaggaggacggacggctgcgggtcccgttccctgcgcggagccccgcgctcaccctggcggcggagctgggggtggggtgggggcgtcgggaagggccgagggaggtgtgaggtgtctgcaggggcgacttcccggtcggtctgtgggtgcagggggtgccgcctcacatgtgtgattcgtgccttgcgggccctggcctccggggtgctgggtaacgaggaggggcgcggagccgcagaagcccaccctggtatgttgacgcggtgccagcgagaccgcgagaggaagacgggggtgggcggggccaggatggagaggggccgagttggcaggagtcatggcagacgccacattcgcgacatctcccccacaccccctctggctctgtccgcaacatttccaaacaggagtcccgggagagggggagaggggctgctggtctgaggctaagaagggcagagccttcgacccggagagaggccgcggcccctgcccagtgggcagcgtggaagtttccatacaaggaggtgggaaggagacccccccccccttcactgccctgtgcagagatgagccgggggtgcaggatgggagcccatggcacttcgctacgggatggtccagggctcccggttgggggtgcaggagagaagagactggctgggaggagggagagggcgggagcaaaggcgcgggggagtggtcagcagggagaggggtggggggtagggtggagcccgggctgggaggagtcggctcacacataaaagctgaggcactgaccagcctgcaaactggacattagcttctcctgtgaaagagacttccagcttcctcctcctcctcttcctcctcctcctcctgccccagcgagccttctgctgagctgtaggtaaccagggctgtggagtgaggacccccgctgccatcccactccagcctgaggcagggcagcagggggcacggcccacgcctgggcctcgggccctgcagccgccagcccgctgcctctcggacagcacccccctcccctcttttcctctgcccctgcccccacctggtctctgctccctcacctgctccttccctttctgttccttcccttcggccccctccttgcccagctcagggcttttcctgggccctcacctgctccgcaccgctgcatgcttcctgtcctgctttctgccggtcccctgacccggacctccaagttcagagtggtggggcttgttgcggaagcgcggcgagggctagagtggccagctggcggagtgtgctcttagaatttggaagggggtggcagagggggcggtgagaggactggccagggtccagtcaaggagatgaccaaggaggctttcagatcctcggcgcagctgcccactagtctttagagagggcatgcaaagttgtgcttctgtcccactgcctgctcagtcgctcacataatttattgcatcaaaaactcccctgggtctgcggagcgaaggctggggctgcccgcctggagggttccaccttctgcaggggcagggccaacttgctgtggtggctcccggcctcccacccccgagtgggttaacccggccctgtggccctgcagcctgtggagggggtgtgtcctaagactggcctccccttccagattgtagtctggggaacctggtgtcggacttcccaggtggcctgagctggtctctccagctcccacggggagagtttggtagcgcaaatagggagatgttctggaggcccctggccttactggttcgatttgaggcctggaaaggaggctctgggcgtgtgtgtgtgtgtttgggggtacccaaggcagactggagttggagaactgggtgactgggaaaacaaggtttctagagcatgggtggcgtggttgtgttaaccattggagtccttgacccaggcctggctcagctgcagactggaaaggtggaaaagccagggggaggggcggggctggcccagcaggactggcctgctgctttgagggcgatggtcctcctggaccccccctgctcagctgggggttgtggggaggaagggactggtcctcctggatgcacatgctctgtaggggtggggctgtctgccatcttggctggcgctggaggcctgagaagtggcgatgtgacgctgggctggccctgcccccatggtgtcataggacggaggccaggtcgggtgtccagcctgggcccctgcagctgtggatgccgctgagctcctgcaataatgaccgtggagatggtcacccctcgtgtaaaattactagtgcttcttgcaaatggaaggaactgggccttttctgtgtgcttctggacgcttcattctgcacatggccctgcgccctcacctcggcattatgacctgtgtgttacttttgtaataaaaataatgtttataggaaagccgtgctttcaattttcaactgaatttgtaggttggcaaatttggtttgggaggggcacctctggcctggggcttggcctggctgccccgctcacgccacttctctcccgcccccaga

SEQ ID NO: 37 - DNA, 2932 bp, Homo Sapiens
gccaagaacaaaatatatcaagataaggaaaatttgtagtcaagaatagaaaaaaattatggctttgaagtatgagttatttaaagaaagtggaaacatcctcagactatgcagtaaaaaacaaagtgattttcttcttctaaacttatgcaataaactgataggtaatatgtgaaagtcatagaatgtagactagaggatacaacaaacctatttcctctatgttcataagaagtaagaaaagctctgatgtgagttagcattgctttacaattttgaattgtgcagattgcacgtacttttcctcagtttgaagtaaatagtggacaggaaaaaatattaaatgttggcagtaaatatggaaggaaattacaactaatgtaatatgctaaaacatgctatgtttattttactaatttgaattaaaatgtaagaatttaaaatgccctggaaaaacacgggcattgatctgacgtctgaagttttaaaatattacacactttgaaatagcatttgtaccttgaaatacctgtctctatatattttttaaaacttcctttttctttcattccatttatcatcaaataaaggatgaacagatgtaactcagaaactgtcaagcatgctgaagaaagaccactgcagaaaaatttctcctagccttttcaaaggtgttaggaagcagaaaggtgatacagaattggagaggtcggagtttttgtattaactgtattaaatgcgaatcccgagaaaatttcccttaactacgtcctgtagttatatggatatgaagacttatgtgaactttgaaagacgtgtctacataagttgaaatgtccccaatgattcagctgatgcgcgtttctctacttgccctttctagagaggtgcaacggaagccagaacattcctcctggaaattcaacctgtttcgcagtttctcgaggaatcagcattcagtcaatccgggccgggagcagtcatctgtggtgaggctgattggctgggcaggaacagcgccggggcgtgggctgagcacagccgcttcgctctctttgccacaggaagcctgagctcattcgagtagcggctcttccaagctcaaagaagcagaggccgctgttcgtttcctttaggtctttccactaaagtcggagtatcttcttccaaaatttcacgtcttggtggccgttccaaggagcgcgaggtaggggcacgcaaagctgggagctactatgggacagttcccaagtgtcaggctttcagatttcctgaacttggtcttcacgggagaagggcttcttgaggcgtggatagtgtgaagtcctctggcaagtccatggggaccaagtggggttagatctagactcaggagctcctggagcagcgcccaaaccgtagtggcactggaccatgttgcccggagcgcgcacagcccgcgcggtgcggggacctgctctctgagcccgcgggcggtgggtgggaggaagcatcgtccgcggcgactggaaccgggagggagaatcgcactggcggcgggcaaagtccagaacgcgctgccagacccccaactctgccttcgtggagatgctggagaccccgcgcacaggaaagcccctgcagtgcccatcgcggccagagcagctggggcatcaacggcgggcgctccctcttactgctctctggcttcgacgggggactagaggttagtctcacctccagcgcgcctgaggctcatgcatttggctaatgagctgcggtttctcttcaggtcgggatggatcttgaaggggaccgcaatggaggagcaaagaagaagaacttttttaaactgaacaataaaaggtaactagcttgtttcattttcatagtttacatagttgcgagatttgagtaatttatttctagcctccagctctgaaataaatgacatgttgttgtttttaattatttttaagaaacgcaagctagcctttggaatcaatatccctgcttagagcagaagtttgttggctgagtggagcacagcatatgcattttccctgtcttttttgttctttcttttaatgatacataatattttacatatttatgaaatggggtacatggaagcgttttttacatgcccggaatgtgtaatgatcaagtccgggtatttgaaggatacatcaccttaggtatatttcatttctatgtgttgataacattttaagtcttctagctactttgaaatatacaatatattgctaactgtagtcaccctcgtctgctatcgaacattggaacttatttgtcctatccaaccgttcttagtcattcaccaacctcttttcatttcacctttttacccttcccggcctctttcccttagtcttggtgtgcctctttctcagctttcctgccccagacaggcggatgctcatatgtgtttctgtcttatgaacttctgcttttcaagtggtgttggtcgcccacacgtgagccatatgctgctggtgatctgctctgtggtccaggctcttgcttccggtaaatggctatgtaaacatcgcgtttgtggcctggctgatgagacagaaggtcaaaagtacatttaggttgttaactggcaataaatatctgtatataatattggtaatgtaatcatatagggaaaataattatttaaagtaaattttgatcatggtgctctgcctttatagaatatttaaaacttcactaaatagattcattgttagtagtaaattgtaaaatagactagtaagtttaataatattagaaactgtaatgtaaattataagataaattagctaaacacattaatattataagaaaccaagcttttcagtgtaagagaaaaaatacaaatgtggaaatcaaatacatttttaaaaataatgttaagtttgaattagaaatttcaatatgaatt

SEQ ID NO: 38 - DNA, 1157 bp, Homo Sapiens
ggatcctgctccctctgaaggctccagggaagagtgtcctctgctccctccgaaggctccagggaagggtctgtcctcttaggcttctggtggcttgcaggtgcagccctccaatcctcctccccaagcggcctgctgcctataaggacacgagtcatactggatgaggggcccactaattgatggcttctgtaaagtccccatctccaaataaggtcacattgtgaggtactgggagttaggactccaacatagcttctctggtggacacaattcaactcctaataacgtccacacaaccccaagcagggcctggcaccctgtgtgctctctggagagcggctgagtcaggctctggcagtgtctaggccatcggtgactgcagcccctggacggcatcgcccaccacaggccctggaggctgcccccacggccccctgacagggtctctgctggtctgggggtccctgactaggggagcggccccaggaggggagagactcgcgctccgggctcagcgtagccgccccgagcaggaccgggattctcactaagcgggcgccgtcctacgacccccgcgcgctttcaggaccactcgggcacgtggcaggtcgcttgcacgcccgcggactatccctgtgacaggaaaaggtacgggccatttggcaaactaaggcacagagcctcaggcggaagctgggaaggcgccgcccggcttgtaccggccgaagggccatccgggtcaggcgcacagggcagcggcgctgccggaggaccagggccggcgtgccggcgtccagcgaggatgcgcagactgcctcaggcccggcgccgccgcactgggcatgcgccgacccggtcgggcgggaacaccccgccccgcccgggctccgccccagctccgcccccgcgcgccccggccccgcccccgcgcgctctcttgcttttctcaggtcctcggctccgccccgctctagaccccgccccacgccgccatccccgtgcccctcggccccgcccccgcgccccggatatgctgggacagcccgcgcccctagaacgctttgcgtcccgacgcccgcaggtcctcgcggtgcgcaccgtttgcgacttggtgagtgtctgggtcgcctcgctcccggaagagtgcggagctc

SEQ ID NO: 39 - DNA, 8093 bp, Homo Sapiens
ccatggaaggaaatgagatcagctagcgagctgacacagaacaaggcagtctaaaacaaatttttttaaaaatacgaagaacagatattgaagggaagaggtgcctgcaaagactaagaaagcacacctggagatggtatctcctcaaagctaaagtcatcaagtgttcaagtgtttcaaggagggtaagactattaacaaggacttagcatagtagagcaatttgagtggcaatacgggacactgggaatacaaatctgtcaagaaaactagtaggaatgagctataggacagtaactggtaaggacctaataattttttttttaatgtacgtattttaactatattcactgctacaacaggaccagtaacaactatatttatttaaaaaaaaaaagactgccatgcagttacagaattacttaatacagaaaacagtaaaatacacttttttctttttctttttttttttttttttttacaaacaagactagcttatagcaaattctctatagctaagggtcaatttaaaatccttggcttatatctccccctcactcaatgactacatgatgcaaactaattttattaacaccttaagcaaaacatactggaatttcacaaaatgtacaagatttcaatatttaaggaactggggttagaaagcagaagtggctttcaggtcttccagtctttctctcaagtaataaagctctgctgtgaatattcaaagctattgggaaattaccggtagatttttctgtttttttttttcggttttccactatgttgtttctctagatatgtaagcttactctattaaccaaaatctcagcttgaccattcttgataagtacctaatcgacatgtaactttttttctgccttaaatatgtataacaggacagagcccttaaatctgattcaattattaattcctgatttacaagtgctatggtgagctaacagaacttatcaatgcctttattgcactttactagccaaatttagaaggttggaattagtctctcctatctagtattctgtcagtttgcccagcttgtacttttaattttgcttctaatggtaatctgccctatcccttgaaataaaataatctacattttgggagggctaattcttcattgtgccaggctgtcccatgcactgcaggggtgagtgtctttaggcttaaatgccaacagaagcccctagtaaatatgacaaccaaaaaagtgcccctacacatttctcagcatcctctggaatgacaggttactgcctctagttgaaagccactggcacaactttggtttttaagctcttatgccatttattttaattgcccagacatcaattccacctaaattcttagtcatagcctggttccttgaatttgctggattagtaaccacagattaaggtgtttcaatagttaagacaggactttggaacaagagtttttaaattgtataatacttgagaggatctatgaatataaattgggtcctgtttataattagttttacataatgaactttaagattgccttttcatggtgaacagaagtttggaaattactgttttggcacaaagcagattatcttagtagaaatacagaattactgcaatctgtgaataagactgcttttaaatatttctacttgtgtgctatcttacatatagaatgtgtacgacagttccaaattttagaataaatccatttctagcatctaacaaaatctgatactgtatcattttaaaacaaagtgtttactttaggcaggattttttaaaataaagcagcaatacccacgcagataagacaaaaaagctaaaatatctcacacctcctaatcctggagtgcaatcttttttcctcatcgtttttgatagggccaaacttgtgtctacagtaaaaaaaaaaaaaaaaagaattactaactggcaaccattaagattctatacttaccatagtcctttaataggcaagctgataaaatagcccccagttattaaaaaaaaaatccaaggaaaacccccaataattagtcttatctccaaattgcatgaagtctcctatatctgaaacttaaaaatgattctaatgacttcctctatcagtaatgtgttatcactgaggtgggtgatggggagggaagagggaagaaatctgtcagtattaccttcgaactcagaaatgtttaaaaaaaagtctcaaacattttgatggttagacaaaacacctccactgttatgtatgggcttcctttttggaaacttatgaacttgctatgtgagcttctgcaaattggttcaaaagcacatttaaggagttgataatttaagactatatgaatcagaattttaacactccattaaaataagagctgaaatttttggcatttatcttcagaacacctaaaaaacagactgcaaattcaactcacattaatactaaatctctttaaaattaactatatcataaaagacaatgactttgtcactaaactaagttttaaaaaaggtggcattctcatgtttcagtcccatgctgccatttgagatgaaaaaaaaggcaactgtcagaattttaattgtgatcagtttggacggctggtacttggtactttctcacaatccaaattagtaaacttgaaaactcaaaccaatttttgcttttagaattaaattcttgttgagtttttcaatcttgtactacaaagccttatggattagattcatttctttctctcacaaggtcatcccaaccgggctccatttcagttgtggcaacccgaaacagggcttggagatgctcatctgttaatggctgactcaaagtgtgttggtttcgagtcaaatatgaaaaagccttttcacagatttggttactatcaaacaaggatgccaccttacaggcaacccctttgataattgggtaggattcagcagacaatccagcataaaactgccccaagtctttgattctgtattcattccaaagattagtgtttgcctgaagttttgttagctccaccctcactgaaataggtgcatattcaggtttaaagttaaatggatttgaaaaaagttctaagtcctttttaatgaacctgaggtccttaaaatgtctctcaaattctttttggagacgacagatcaccatttgatacctatcaggatcaaatattttttcatcttccttattttgctgttttagctcatcaacaacttctctgagggcaggaaagtctgttagatttttttcctcaatatgtctttgaaataaattcagcttaacttcgaaagtacaaatatggtcaaaggcagcagcagcaaagactttactaactcgtaattcttcactgagttctcgaaggtgttccataatgtccaccaagaagccaaagtcacaaagccattgtttgtctgagaagtggactgttgttgcccctactgaaaccaagaacgcttccatttcttttcttagagagaatattagttttaaagttttccctctcctaagccaattgttcagacatcgtccattaaccctttcaccatgctctgattcagattccgttagtaaagtctgaaattcaggtcgcctaacgcctctggtcttaatcaaaactatccattcggatatggtatttatgatctgattaacatctacatcataggagctcaacagttccaagtgaagaaatcctgaataatgaatgacattccaacagttggggcttacggccttttctctcatgtatgagacgagtcctgagttctcaccaatcatcctcaaagtatgggtcgtggtcagtccaaccattctctgcaagctaagccctgctgtctgcagggactctaggattgccgacatgagcgcaccaacactgaaatgatgagtcaggttgattatggtcagaagatcttcttgcacctccaactcagggcctacaccgcggataaagaccaggaggtagttctcataggccacaaaagcctggtcgtccaaggcaagagaataggctttaaagtccctggctcggttaaaaagctggttgcgtagattcctgtcaatgctcaggatcctctgccttgtgatatctggagataagtcaacgccttgcaggacgcttacatgctcgggcagtacctctctcagcaacacctccatgcactggtatacaaagtccccctcaccccagccgcgacccttcaaggccaagaggcggcagagcccgaggcctgcacgagcagctctctcttcaggagtgaaggaggccacgggcaagtcgccctgacgcagacgctccaccagggccgcgcgctcgccgtccgccacataccgctcgtagtattcgtgctcagcctcgtagtggcgcctgacgtcgcgttcgcgggtagctacgatgaggcggcgacagaccaggcacagggccccatcgccctccggaggctccaccaccaaataacgctgggtccactcgggccggaaaactagagcctcgtcgacttccatcttgcttcttttgggcgtcatccacattctgcgggaggccacaagagcagggccaacgttagaaaggccgcaaggggagaggaggagcctgagaagcgccaagcacctcctccgctctgcgccagatcacctcagcagaggcacacaagcccggttccggcatctctgctcctattggctggatatttcgtattccccgagctcctaaaaacgaaccaataggaagagcggacagcgatctctaacgcgcaagcgcatatccttctaggtagcgggcagtagccgcttcagggagggacgaagagacccagcaacccacagagttgagaaatttgactggcattcaagctgtccaatcaatagctgccgctgaagggtggggctggatggcgtaagctacagctgaaggaagaacgtgagcacgaggcactgaggtgattggctgaaggcacttccgttgagcatctagacgtttccttggctcttctggcgccaaaatgtcgttcgtggcaggggttattcggcggctggacgagacagtggtgaaccgcatcgcggcgggggaagttatccagcggccagctaatgctatcaaagagatgattgagaactggtacggagggagtcgagccgggctcacttaagggctacgacttaacgggccgcgtcactcaatggcgcggacacgcctctttgcccgggcagaggcatgtacagcgcatgcccacaacggcggaggccgccgggttccctgacgtgccagtcaggccttctccttttccgcagaccgtgtgtttctttaccgctctcccccgagaccttttaagggttgtttggagtgtaagtggaggaatatacgtagtgttgtcttaatggtaccgttaactaagtaaggaagccacttaatttaaaattatgtatgcagaacatgcgaagttaaaagatgtataaaagcttaagatggggagaaaaaccttttttcagagggtactgtgttactgttttcttgcttttcattcattccagaaatcatctgttcacatccaaaggcacaattcattttgagtttctttcaaaacaaatcgtttgtagttttaggacaggctgatgcactttgggcttgacttctgattaccctattgttaaattagtgacccctcttagtgttttcctgtcctttatttcggaggacgcacttcgaagataccagattttatgggtcatccttggattttgaagcttataactgtgacaaaaaatgtgaagggaagagatttgaaacatgtggaaggaaaagtgagtgcagactataaacttccaaaaagacaagcccaaaatacacctaaacgttatgtcagattattttgttaaaatcagttgttagtgacgtccgtacgttaatagaaaaaagaatgcttcagtttggagtggtaggtttctagagggatttattgtgaaagtataaactattcagggcaatgggactgagagaacagtgggtagaaaggaccactgaaggaaaggaagagaattggaaggtagatgaaagaaggagcaagaacctggggatgttttttccttttcacttgtaatagtagtaacagaagcaatggcagactggcttttgtttctactgtgttagaatgaattgacaggacaactgggcctattattgtactgtgccagaatactgtaaaacaaaactaaacatactagcttggtggcttgtaattaattacttaagtggagatttttattttttttttattttttttttagacggagtctcactttgtcacccaggctggagtgcagtggcgcgatctcagctgactgcaacctcctcctcacaggttcaagggagattctcctgcctcagcctcccgagtagctaggactataggcatgtgccaccacacctggctaattttgtatttttagtagagatgggatttctccatgttggtcaggctggtgtcaaaactctcgatctcaggtgaaccgcctgcctcagccttccaaagtgctgggattacaggcgtgagccaccgcgccctgcagttttttgtatttttaatagagacagggtttcaccatgttagccaggatggtctcgatttcctgacctcaggtgatctgcccgctttggcctcccaaagtgctgggattacaagcatgagccaccgcgcccggctcaagtggagatttttatatggagtccagttatactctttttaatatataagttgagatgactaatacaacttcaatacaggggctcatgagaaatgtctgtaatatttaagtaacttattgtcttctttcttttttttttaagatgaagtcttactctgttgcccaggcggaagtgcagtggcgtgatcttggctcagggcaacctctgcctcctggtttcaagcgatcttcctgcctcagcctcccgagtagctgggagtacaggcgtgcatgaccacacccggctaatttttttatttttagtagagacggggtttctccatgttggccgggctggtcttgaactcctgacctcaggtgatccgcccacctcagcctccccaagtgttgggattacaggtgtgagcccccgtgcccagcctattatcttatttctgaataaagaattgtctgtgtggggaatagataactctttctcatgcagcccctgctagaaaatttgttttctctagcagttggtctgtgcttataggctactctttgaaagcacaaaaaatttattgacttcttttttttgggtttttttttttttttgagacagagttttgcccttgttgcccaggttggagtgcaatggcgcgatctcagctcaccgcaacctccacctcctgggttcaagtgattctcctgccttagcctcctgagtagctgggattacaggcatgcgtcaccatgcctggctaattttgtatttttagtacaaatggggtttctccatgttggtcaggctggtctcaaactcctgacctcaggtgatccacccgccttggcctcccaaagtgctgggattatgggtgtgagccattgcgcctggccagaaaattcattgacttcctaaagatttattaactttctgcattacttttttttttcccctccatcgtaaatataaaagggaatagtagagaaaatcattcagaattttattttttagtgacattatttagtgacattttattagagtcacttaggaacctgaggctgaataaagttcaggtaaaagtaaaattagttgagaagagacatctgccaaaagaaatctatttttaacttcacttgctgtctttcctagaggaacagaaatagtgctgaatgtcctattagaaatgatggttgctctgcccgtctcttccctctctctcacacaatatgtaaactcatacagtgtatgagcctgtaagacaaaggaaaaacacgttaatgaggcactattgtttgtatttggagtttgttatcattgcttggctcatattaaaatatgtacattagagtagttgcagactgataaattattttctgtttgatttgccagt

SEQ ID NO: 40 - DNA, 7040 bp, Homo Sapiens
acatagtctggcttgagggaagatgccagtatgtgatcataaattggacaaaatcattcaagacagccgcattttaatcagatcaaatttcaaaatttcaaatatctataagcattttatgttcttaaaaacatgagaaacttgcaagatatcattaaattcaaaggtttccaaaaccagtttgaaacacatttgtatgtcttaaaaccttttgtgaagtttagctgtatttagacaagtaaaattttatttacgtatctccagagtcaaaatacaaaacccaagcgatcagggcaaagtggaagcaaccaaccccaacctccccgcatggaaacagatagtgtgcgctggtcacatccagggacgtgctccatgcaatccacaaactaagatctgccccgaccatattatatggaccatataaaaattaaagtagctgtatatgtactttactgacatagaaacaagtctatgttatattgctaagtataaaattcaaattttagaatgtcaatagtataatcccactgaagtaaaaaaaaattgatatgtttttcaagtttgagtctataatctttgtatgggaatttttagtaaagcgtatatattcatctacagcttaactttttagtcttaaaaaaggcaaaagtgaaatttcgacaatgaaatccacggttgtaaccagcaataccacacttgcacggttgcaatactcgcgctcttcgcactgtaacctctggaatccactgtaacctctcgaatccgctgtcacccgagatctcttaacctggcggtcccctgccaggactcgggcggccgtcaagagtgcgcaggcgcaagcgcggccgccgtcggtggggttttatgtgctgttgagactgctgttgagcttctgggcctttttaagactgccttccaaaagacgacgtgatgactctaaagagaaaggaaaatttgttgcgtacgcagaagggcaggctgggcgcactctgagcgtctttcggggaccgacggcctcgcccacgtgcttccgggcaccagcgcgcccaaagcccgtgcactaggaaacgcacaaaagcaccagcgggcgagcccgagggcgagcccacgggtagccaggaggcggcgagggcggcttgtcttccagagactggggaatcaagaaaggcagagccacctcctcggccccagcgcagcaagtgcaggaggcagggagggcgcagcgccccgccgtccacggtacccgtggaacccggtgcgcgccccgggagctggggcggctcaggcccagcgtgcccagaaagccaaccacgttggtcaggaggacgttctcccactatccgcgatcctcaggctctgattaaagtcaaattaaaaggagctatccgttccggtatctgttgttactcttgtgataaatatggtgtttgatacgaaagtatcttaatagtcatgctgccaatcaaagaacaaaacacgtaaagcctgtgcgctaagaacacgagagcatttcgctcctcaggaggtgcagtttatcttgtctcctttgtttcatatataattccaaggagaattccttgttatcaacacattttgctctttgcctttgggggatgacataggcatattgcatttgatcagattagtgttaaccttccacccacgtttttactacatgctgtaccattaatacagcaggattttatacctttaaccgcaaaattcaagagcagaaaaatactcaaattgtatgttagtttaacatgaaaacgagttatttcagccctgataggatacttttaaaccaatactacctaacaaatatgtttcttattcgtataagcccatacacatggttttttaaatgagttttataaataataattagcattgaggccctgatctaagtatttgaaactctgttactcttcacaacaatcctgagatgggcatattttcctcattttgcagataaggaaacaggcactgggatggtaagaaacccaggccatctggcccctaatagccttttaccaccatgctaaagctttacccatttttgagatccaaaatattacatagtgcacacatatttggtaaccaaatcaggattaaacattaaagttaagggccaagcacagtgccctgtaatcctagcattttgggaagctgaggcgggcagatcgcttgacctcaggagttcaagaccagcctggaaaacatggtgaaaccccatctcaacaaaaaaatacaaaaatagttgggtgtggtggtgtgtgcctgtggtcccagctacttgggaggctgaggtgggaggatcgcttgagccaaggaggcagaggttgcagtgaaccaagatcacaccactgcactccagcctgggtgacatagtgagacgctgtctcaaaaagaaaaaagcaaaattaaagtaagaacataataagaaatatgtttggcactgtgttacggggagaaaaaatcaatagggagataaatcctgctttcagggtaagtgcaatttgctgagtaaaagaaatattttaagataccttaaaaaagaaaacaaaggctgttgtaaattggatattcaattaaatattcttgggcagattggcagatgatagatctaatgaacttggggtttataaatacacagaatgccacattttcactaataccttatgttttgggtaaagagtaaaaccaactttgaaaatgaattgtgtatgcaattatcttaaaaataaagattatataataagtcacattatcttgcattatgtgtaatatctagggggttaaggcactctcattctgctaatattcacagcactcctattatataaccatttcagagccctgaattataatcctaactaggtgacagttactgagtaaattttgcaatgtaaatttattatagaatataattgtattactttttctctattcattggcatccttttatatttggggtttgacacaattgcacacaacaatctttctactaaaatattccatagagttggccaggcatggtggctcacgcctgtaatcctagcactttgggaggctgaggcaggtggatcacctggggtcaggagtttgagaccagcctggccaacatggtgaaaccccatctctactaaaaatacaaaagttagctgggcatggtggcatgcgcctgtaatcccagctactcgggaggctgaggcgggagaatcgcttgaacccaggtggcggaggttgcagtgagcggagatcgtgccattgcactccagcctgggcaacaagagcgaaactctgtctcaaaaaaaaaaaaaagattgaggctcaagcaggttaaatattatacacacactagatcacatactaagccacacaggttgtatagaatagaaatcctattccagggcttcacagacctcaaattgtttctgtaaatggttcatgtttattaatttaccttctcaaagtcaatatacttcaaaaacagaactgctatcattaaaatgtggttacacataacctaacacataagtgctttagaagaagggaactttaccatttgattttttaaaatatagatcctaacacttttgtgtgtgtgtgttttctcatgaatatggtaatattattggtcctttttccaaagatatggtatgaaattaattttttgcttagagtcaggatcttgctccatcatccagcctggtgtgcagtggcacgatcatagctcactatagcctcaaactcctcagttcaagtctcctcccgccccagcctccaaagtagctaggactataggagtgcaccaccacactcagctaactttattattattttttgtagaggcaggtctcaaattcttggcctcaagtggcccttccaccttagcctcccaaagcactggtattataggcataactcactgcacttggtagaaaattaattttcattataaaaatcagaaagaaagatcttattgtctgatggccaataccctgaatttcattccaacttctggttttctacattatatgtaggtaccagtgattttgtgccatttttatttcttcagatttttcctcttctacaattctcccatatgtgttattatttgaagccctgatcacagctctgaatcatttctattcttttgtctcccccaactctggttcaaaacttcggtaactcatttgctacgaagtctagaatctctcttgcaagtgagctgaccggttgggccaaatcgccttggaagggaaggattgttaggaagtcagtatgttgctaagatgtcttgctaatttgctgtgtaagctgcatagagtgtcaggggattctcctttccactgatgaatttaggtgtgtgttatgacctgtatcagtgattctatttggattgattaaggttgcaattttttatccatatgaatgttgcacctagtttttccctgtaattggttaaacaaatgtctgctgtttgcattttaactcttagccaatacctgctggaagtgatttaatgcagctggagaatgacactaacaatcattacagcctgcaaagtgtgaaacaatttcattgtgctttgtggtctctttagtctgaggactgataatgtgcagcggatgagacttgaaaaaaacgtattttattataatttaagaaataatgtaaaagaggggtgagttctgaggcagctccatgctgtttgtctggcatgagcttgtttttataagaattcacttcaagtgtggaagggaaatgctttcatctgaaagggatagctgtgcttcattccggtttctccctccatctgataaaaactcttgctgagtgacagcacagatgtagctcatttggaacaagtgaaggaaaaggagaaaagggatgaggtggagcgaaggagtagtcagtcatgtttccaaagtcccgcggtttcccctagtctcttcattcaatccagcggccctggtgtccccctgcaaagtgagatgccctcgcccctggccctacgcccctacctccggagcgagttttccccatcggtggacgcgcggccctgcagcagtccctcagagctacctgcgaagctgcttctgggggccatcttcctcgggccccgcggctgccgcgccggctggcctggtgctccattgactgggagcaggtgtgcttgctgcagaggctgggagctggagggtttggctcggtgtacaaggcgacttaccgcggtgttcctgtggccataaagcaagtgaacaagtgcaccaagaaccgactagcatctcggcggagtttctgggctgagctcaacgtagcaaggctgcgccacgataacatcgtgcgcgtggtggctgccagcacgcgcacgcccgcagggtccaatagcctagggaccatcatcatggagttcggtggcaacgtcactttacaccaagtcatctatggcgccgccggccaccctgagggggacgcaggggagcctcactgccgcactggaggacagttaagtttgggaaagtgtctcaagtactcactagatgttgtgaacggcctgctcttcctccactcgcaaagcattgtgcacttggacctgaagcccgcgaacatcttgatcagtgagcaggatgtctgtaaaattagtgacttcggttgctctgagaagttggaagatctgctgtgcttccagacaccctcttaccctctaggaggcacatacacccaccgcgccccggagctcctgaaaggagagggcgtgacgcctaaagccgacatttattcctttgccatcactctctggcaaatgactaccaagcaggcgccgtattcgggggagcggcagcacatactgtacgcggtggtggcctacgacctgcgcccgtccctctccgctgccgttttcgaggactcgctccccgggcagcgccttggggacgtcatccagcgctgctggagacccagcgcggcgcagaggccgagcgcgcggctgcttttggtggatctcacctctttgaaagctgaactcggctgactgaaaacctggtcaagataagtttttgtctgattctatttgtttttaaaggaagtggagatgtcgaagaaaacatatttgtaggatggagttttagaaaataaagttactaaaaactcctttagtctccagtgctttttctaggacacattagcaaagctacaagtctagtacctgttgtctcagtactgttagtaactaatcttattcatatagtcatgtgctttgctttccattgctagtatttcatttatttaaatttgttattgataaaagtttgtccaaaatagaactccactgcagaaatgtcaaaattttctataaatccatatatatcccatacctaccacataaattccaactattaatggtgtagttgctcccacaccaaatcagtaaaaacttttaaaaaaataagtaatgctttcctactactccccccagtaaaacttcttgtttgtaatgaccttcactcataaaagtcatacactgaggtacatttacattcaaaggaattatatcataaatgacttattgtaatatctttaacttgtgcattgcaatgagtagaaacattttgctaaaacacttctaaactgggtcatttttacctggtattgggactcagaagtagaagataaagattatatgatgtgagaggaaaatgtaggagtagaaggtaaagattatatgatgtcaggaatcatgaaatttaacatttggatggaagagaacagacaaatagaactagattgcccactctagacatcaaaacaatggatgttggtacataggatttaaaggagaaggtgattggattttgtcattgggacagctttgactttcttttagcaatagcagtttctgtgcatggtggaaagcaaggctgatgcaatggctggcagagggaatggcaaggccctgaagcagaggctgtgcatgcactgttaaggagggagaggcaggaagcttaaaagggggtcagagacacagaaatgtt

SEQ ID NO: 41 - DNA, 1303 bp, Homo Sapiens
cggaagggaaatgctttcatctgaaagggatagctgtgcttcattccggtttctccctccatctgataaaaactcttgctgagtgacagcacagatgtagctcatttggaacaagtgaaggaaaaggagaaaagggatgaggtggagcgaaggagtagtcagtcatgtttccaaagtcccgcggtttcccctagtctcttcattcactccagcggccctggtgtccccctgcaaagtgcgatgccctcgcccctggccctacgcccctacctccggagcgagttttccccatcggtggacgcgcggccctgcagcagtccctcagagctacctgcgaagctgcttctgggggccactcttcctcgggccccgcggctgccgcgccggctggcctggtgctccattgactgggagcaggtgtgcttgctgcagaggctgggagctggagggtttggctcggtgtacaaggcgacttaccgcggtgttcctgtggccataaagcaagtgaacaagtgcaccaagaaccgactagcatctcggcggagtttctgggctgagctcaacgtagcaaggctgcgccacgataacatcgtgcgcgtggtggctgccagcacgcgcacgcccgcagggtccaatagcctagggaccatcatcatggagttcggtggcaacgtcactttacaccaagtcatctatggcgccgccggccaccctgagggggacgcaggggagcctcactgccgcactggaggacagttaagtttgggaaagtgtctcaagtactcactagatgttgtgaacggcctgctcttcctccactcgcaaagcattgtgcacttggacctgaagcccgcgaacatcttgatcagtgagcaggatgtctgtaaaattagtgacttcggttgctctgagaagttggaagatctgctgtgcttccagacaccctcttaccctctaggaggcacatacacccaccgcgccccggagctcctgaaaggagagggcgtgacgcctaaagccgacatttattcctttgccatcactctctggcaaatgactaccaagcaggcgccgtattcgggggagcggcagcacatactgtacgcggtggtggcctacgacctgcgcccgtccctctccgctgccgtcttcgaggactcgctccccgggcagcgccttggggacgtcatccagcgctgctggagacccagcgcggcgcagaggccgagcgcgcggctgcttttggtggatctcacctctttgaaagctgaactcggctgactgaaaacttggtcaagataag

SEQ ID NO: 42 - DNA, 2501 bp, Homo Sapiens
taagctcttcatgtgtaccccactgtgctgttctcctattctcagttcatctctttgcatctcaacttggaaggtaagaacttaatcaggatgcactgaacaattggcagaaactcatgtgaatgtaactatcttgtccagttccttaacctgtgctaagtccaggcaggcacctgaagaaaaaaaaaaaaaagcatgaaggaggcttttgcccaaatggcactatacttgggggattctgagtagggctgaaacagcctttgcaaaaattataactgaggaaattatggcagtgacaaagatcagacctaaatgactcagtctttcttctaactttcatgctgtccttattcattcctgggcataggccaaactaaccttagaaaggaattcagtttatggtttgactcagaaacaaaatcaataatagccctttcccgaaaagacccccttcttgcctgggtgccagtctgcctttgtacgattaatctattagttacaacattagaaattatggtttaggggtcctgcggcgtcaggctgcaagagtctgaaccttcccaagttgctgctggggataacatcgctattgtaaaatctaacatcctattttgcagaccctgcactggatggatcagctgacaccactcagaccgtgtgtgatctggctcaaccagttctgcgatcccacccaggaacagaagactgcaagaaaacgttacttcaacccccctgtgatcccatctgcaacctgaccaatcagcactccccaagtcccaagcccctatctgccaaattatctttaaaaactcccagaggcagggtgcagtggttcaacgcctgtaatcccagcactttaggtggatcacgagatcaagagatcaagaccagcctggccaacatggtgaaaccccgtctctactaaaaatacaaaaattagctgggtgtggcggcgcgtgcctgtaatcccagctacccaggaggctgaggcaggagaatcgcttgaacccgtgaggcagaggttgcagtgagccaagaccatgccactgcatttcagcctgggcgacagagggagactccgtctgaacaaacaaacaaacaaacaactcccggaatgcttggggagactgatttgagtactggaatcccagtactttaggaggccaaggtaggtggatcatttgaggtcaggagttccagaccagcctggccaacatggtgaaaccccgtctctactaaaattagaaaaattagccgggtgtggtggtgggcgcctgtaatcccagcactttgggaagccaaggcaggtgaattatctgaggtcgggagtttaaggccagccttaaactggcgaaaccccgcctctactaaaaatacaaaaattatctgggcatggtggcatgtgcctgtaatcccagctactcgggaggctgaggcaggagaatcgcttgaacccgggaggcggaggttgcagtgagccgagatcacgctattgcactccggcctgggcaacagagcgagactccgtctcaaacaaacaaacaaaggaacgaaaacctccggtctccggcacggcaagctctgcgtgaattactttctccattgcaactcccctgtcttgataaatgggctctgtctaagcagcgggcaaggtgaactcgttgggctgttacaggaccagtgacagaccaagggcatgccactgaaggaatccctagacgcacccttctggatgtgagacaggcggatctcacccacgcctgccagcagctcctcggagaactgtgttcctgggtcagccctggcccagaggagcgccggggacccgcagagtgctgctgaagtcaaggctacaactcacctaggatctggggcgccagccctccggtgggcagggcgttctcctcccccaccccctccccgcacgatgacatcaagtgtttggcgttgagttgctccataaaagctgcccggggaagccaggagagcgaagggcggacgtactcgccacggcacccaggctgcgcgcacgcggtcccggtgtgcagctggagagcgagcggccaccgggagcccccggcacagcccgcgcccgccccgcaggagcccgcgaagatgccccggcgcagcctgcacgcggcggccgtgctcctgctggtgatcttaaaggaacagccttccagcccggccccagtgaacggtaaagtttccgcctgcttctttcctaacactcctgagcgctcagccgcccctgggctgaaggctcttcaatgataaagtaaaatcattgctgcggggagcagggaaggtgtagtaccaaatagtagattctcaagaaaggatgctccgttttcctttgctgaggttgggtcgggaagcacgttgctttctagtggcgcttggcgcagatttggtgttaaaatgtttgcgtgtactcccgggcaccgccagctctgaagatgtggcttgggaacttgctaaccagggaggagatgcaaagc

SEQ ID NO: 43 - DNA, 4165 bp, Homo Sapiens
catccaggcgcgatgatctctgctgccagtagagggcacacttactttactttcgcaaacctgaacgcgggtgctgcccagagagggggcggagggaaagacgctttgcagcaaaatccagcatagcgattggttgctccccgcgtttgcggcaaaggcctggaggcaggagtaatttgcaatccttaaagctgaattgtgcagtgcatcggatttggaagctactatattcacttaacacttgaacgctgagctgcaaactcaacgggtaataacccatcttgaacagcgtacatgctatacacgcacccctttcccccgaattgttttctcttttggaggtggtggagggagagaaaagtttacttaaaatgcctttgggtgagggaccaaggatgagaagaatgttttttgtttttcatgccgtggaataacacaaaataaaaaatcccgagggaatatacattatatattaaatatagatcatttcagggagcaaacaaatcatgtgtggggctgggcaactagctaagtcgaagcgtaaataaaatgtgaatacacgtttgcgggttacatacagtgcactttcactagtattcagaaaaaattgtgagtcagtgaactaggaaattaatgcctggaaggcagccaaattttaattagctcaagactcccccccccccaaaaaaaggcacggaagtaatactcctctcctcttctttgatcagaatcgatgcattttttgtgcatgaccgcatttccaataataaaaggggaaagaggacctggaaaggaattaaacgtccggtttgtccggggaggaaagagttaacggtttttttcacaagggtctctgctgactcccccggctcggtccacaagctctccacttgccccttttaggaagtccggtcccgcggttcgggtaccccctgcccctcccatattctcccgtctagcacctttgatttctcccaaacccggcagcccgagactgttgcaaaccggcgccacagggcgcaaaggggatttgtctcttctgaaacctggctgagaaattgggaactccgtgtgggaggcgtgggggtgggacggtggggtacagactggcagagagcaggcaacctccctctcgccctagcccagctctggaacaggcagacacatctcagggctaaacagacgcctcccgcacggggccccacggaagcctgagcaggcggggcaggaggggcggtatctgctgctttggcagcaaattgggggactcagtctgggtggaaggtatccaatccagatagctgtgcatacataatgcataatacatgactccccccaacaaatgcaatgggagtttattcataacgcgctctccaagtatacgtggcaatgcgttgctgggttattttaatcattctaggcatcgttttcctccttatgcctctatcattcctccctatctacactaacatcccacgctctgaacgcgcgcccattaatacccttctttcctccactctccctgggactcttgatcaaagcgcggccctttccccagccttagcgaggcgccctgcagcctggtacgcgcgtggcgtggcggtgggcgcgcagtgcgttctcggtgtggagggcagctgttccgcctgcgatgatttatactcacaggacaaggatgcggtttgtcaaacagtactgctacggaggagcagcagagaaagggagagggtttgagagggagcaaaagaaaatggtaggcgcgcgtagttaattcatgcggctctcttactctgtttacatcctagagctagagtgctcggctgcccggctgagtctcctccccaccttccccaccctccccaccctccccataagcgcccctcccgggttcccaaagcagagggcgtgggggaaaagaaaaaagatcctctctcgctaatctccgcccaccggccctttataatgcgagggtctggacggctgaggacccccgagctgtgctgctcgcggccgccaccgccgggccccggccgtccctggctcccctcctgcctcgagaagggcagggcttctcagaggcttggcgggaaaaagaacggagggagggatcgcgctgagtataaaagccggttttcggggctttatctaactcgctgtagtaattccagcgagaggcagagggagcgagcgggcggccggctagggtggaagagccgggcgagcagagctgcgctgcgggcgtcctgggaagggagatccggagcgaatagggggcttcgcctctggcccagccctcccgctgatcccccagccagcggtccgcaacccttgccgcatccacgaaactttgcccatagcagcgggcgggcactttgcactggaacttacaacacccgagcaaggacgcgactctcccgacgcggggaggctattctgcccatttggggacacttccccgccgctgccaggacccgcttctctgaaaggctctccttgcagctgcttagacgctggatttttttcgggtagtggaaaaccaggtaagcaccgaagtccacttgccttttaatttatttttttatcactttaatgctgagatgagtcgaatgcctaaatagggtgtcttttctcccattcctgcgctattgacacttttctcagagtagttatggtaactggggctggggtggggggtaatccagaactggatcggggtaaagtgacttgtcaagatgggagaggagaaggcagagggaaaacgggaatggtttttaagactaccctttcgagatttctgccttatgaatatattcacgctgactcccggccggtcggacattcctgctttattgtgttaattgctctctgggttttggggggctgggggttgctttgcggtgggcagaaagccccttgcatcctgagctccttggagtagggaccgcatatcgcctgtgtgagccagatcgctccgcagccgctgacttgtccccgtctccgggagggcatttaaatttcggctcaccgcatttctgacagccggagacggacactgcggcgcgtcccgcccgcctgtccccgcggcgattccaacccgccctgatccttttaagaagttggcatttggctttttaaaaagcaataatacaatttaaaacctgggtctctagaggtgttaggacgtggtgttgggtaggcgcaggcaggggaaaagggaggcgaggatgtgtccgattctcctggaatcgttgacttggaaaaaccagggcgaatctccgcacccagccctgactcccctgccgcggccgccctcgggtgtcctcgcgcccgagatgcggaggaactgcgaggagcggggctctgggcggttccagaacagctgctacccttggtggggtggctccgggggaggtatcgcagcggggtctctggcgcagttgcatctccgtattgagtgcgaagggaggtgcccctattattatttgacaccccccttgtatttatggaggggtgttaaagcccgcggctgagctcgccactccagccggcgagagaaagaagaaaagctggcaaaaggagtgttggacgggggcggtactgggggtggggacgggggcggtggagagggaaggttgggaggggctgcggtgccggcgggggtaggagagcggctagggcgcgagtgggaacagccgcagcggaggggccccggcgcggagcggggttcacgcagccgctagcgcccaggcgcctctcgccttctccttcaggtggcgcaaaactttgtgccttggattttggcaaattgttttcctcaccgccacctcccgcggcttcttaagggcgccagggccgatttcgattcctctgccgctgcggggccgactcccgggctttgcgctccgggctcccgggggagcgggggctcggcgggcaccaagccgctggttcactaagtgcgtctccgagatagcaggggactgtccaaagggggtgaaagggtgctccctttattcccccaccaagaccacccagccgctttaggggatagctctgcaaggggagaggttcgggactgtggcgcgcactgcgcgctgcgccaggtttccgcaccaagacccctttaactcaagactgcctcccgctttgtgtgccccgctccagc

SEQ ID NO: 44 - DNA, 1501 bp, Homo Sapiens
agtttaggagttcgaggttgtagcgagttatgatcgagttattgtattttagttttgacgttgagtgagattttgttttttaataaaatatatttaaaatttaaaaagaagattatataaaggggttatttattattttggttagtaatgtagggtaaaatttgaaataatttggttttgtagtattttttagatgttaaatttttattttttattgtatagtttttatagtgttttgtgtgagatgagagggagtatggcgggttttagttggttttgttttgggaaaaattttttatttttgtatcgtttttttaaagcgggggttaagttagcgtcgtttgtttttttatttagattagattttttttttagatgtttttatttttttgaagttttataataattttgtgaggtaagtattattatttttttattttatagatgaaattgaagtttaggaaggttacgtttcgggttttaaatttcggaattttcgtttcgatgttatttaggtttgggttattgagtttaagaaacgggtcgacgggtgattagacggacgtcgggattagtttaagtttagggttgagggtcgttaggtggcgcgtttttttttttttatttttcgcggcggttcgggcgtatttgaatttagcggggtgcgtcggggaaagtaggcgcgtagggtggggcggggagtagttttaattttttagttcggagtgggtaaggagtacggtttagtttagtcggttggtatcgttaagcggtcgtcgggtcgtattagttttttttttgtttgcgttttttagcgtgtaatttatttggggggttatcggggattgaacggagcgggcgagcgttgttaggaggtggggtcggttttatttgtcgattgttcgtagtaggtagggagagggcggggtttgttttatagggttcgttttttagtttttgggtttcgggcgcgcgacgagatataaggtagttaggaaataatgcgtttgtagttcgcgttttcgcgtcgatttcgagagcgttcgggtcgtcgtgcgcgagcgagggagggcgcgcgcgcggggggggcgcgtttgtgagtgcgggtcgcgttttcggcggcgcgtatgtgcgtgtgtgttggttgtcgggttgtttcgagtcggcggggagtcggttcgttttaggtggcgggcggttggagcgaggtgaggttgcgggtggttagggtacgggcgcgggtttcgcggtgcgggttggttgtaggttgttttttgggtacggcgcgttttcgttcggtttcgtcgggttttgggagttgcgtttcgggcggcgttggtaaagtttgttttgaattcgttgtttatagtcgggttcgcgcgttgcgattggttttttttattattttgattcggggttcggtttttcgggacgcgaggattgggcgtaggttgtaagttggtggggttggggaggaacgagagttcggtagtcgattgtg

SEQ ID NO: 45 - DNA, 3025 bp, Homo Sapiens
ctctcacgacctgatttctacagccgctctacccatgggtcccccacaaatcaggggtacagaggagtattgaaagtcagctcagaggtgagcgcgcgcagccagcgtttcccgcggatacagcagtcgggtgttggagaggtttggaaagggcgtgccggagagccaagtgtcagccgcctagggcttgccggtcgctccctccctccctgcccggtaggggacctagcgcgcacgccagtgtggaggggcgggctggctggccagtctcgggcccctcggccaccccggggaccccccccaagccccgcccccgagtgttcctattggcctcggactccccctcccccagctgcccgcctgggctccggggcgtttaggctactacggataaatagcccagggcgcctggccgagaagctaggggtgaggaagccctggggcgctgccgccgctttccttaaccacaaatcaggccggacaggagagggaggggtgggggacagtgggtggggattcagactgccagcactttgctatctacagccggggctcccgagcggcagaaagttccggccactctctgccgcttgggttgggcgaaagccaggaccgtgccgcgccaccgccaggatatggagctactgtcgccaccgctccgcgacgtagacctgacggcccccgacggctctctctgctcctttgccacaacggacgacttctatgacgacccgtgtttcgactccccggacctgcgcttcttcgaagacctggacccgcgcctgatgcacgtgggcgcgctcctgaaacccgaagagcactcgcacttccccgcggcggtgcacccggccccgggcgcacgtgaggacgagcatgtgcgcgcgcccagcgggcaccaccaggcgggccgctgcctactgtgggcctgcaaggcgtgcaagcgcaagaccaccaacgccgaccgccgcaaggccgccaccatgcgcgagcggcgccgcctgagcaaagtaaatgaggcctttgagacactcaagcgctgcacgtcgagcaatccaaaccagcggttgcccaaggtggagatcctgcgcaacgccatccgctatatcgagggcctgcaggctctgctgcgcgaccaggacgccgcgccccctggcgccgcagccgccttctatgcgccgggcccgctgcccccgggccgcggcggcgagcactacagcggcgactccgacgcgtccagcccgcgctccaactgctccgacggcatggtaaggccgggaccccaggaagtgaggaagttagggcggcgctcgggatatcagggacgcgtttccgagggcggggagctggccttgcgggaggtttgggccaggatccttcccgagagagaggacccccttgtcctgggcagctgtcactggggtagcctgttttggaagtgtgcgggcaagcgttcgagctgccccattgggggcgctattagaacactgcagcgcgaacgtgaagatctttttctctacttatccctacttccaaaatgtaaatttgcgccccttggtgactgtccgcccttggtttggccctgcatgttgcagacctcatctcctacccacccgtaattacccccccaaccaggacaggtctgggcccggaactagagccttaggctagagttagggagggggcggctacaggaattggtgttcgggcctcgagccgtcccgcgggcctgactcagtcgcccttgctgtttgcagatggactacagcggccccccgagcggcgcccggcggcggaactgctacgaaggcgcctactacaacgaggcgcccagcggtgggtattccgggcctctccctgctcgctcctcctccttcatggagctgtcctggcctctatctaggacgctcccacccccactcacacacgcctatgtcctgggaagtggtgcaggagatgaaatactaagcaagtagctccctgtcttttcgattgtcccggactctaactaaagtcctcagtttccaatctgtctcaaagtactgggcccgggggtgggaggcttgtcgcggccccacccctgcttactaaccgagccctccccgcgcagaacccaggcccgggaagagtgcggcggtgtcgagcctagactgcctgtccagcatcgtggagcgcatctccaccgagagccctgcggcgcccgccctcctgctggcggacgtgccttctgagtcgcctccgcgcaggcaagaggctgccgcccccagcgagggagagagcagcggcgaccccacccagtcaccggacgccgccccgcagtgccctgcgggtgcgaaccccaacccgatataccaggtgctctgaggggatggtggccgcccacccgcccgagggatggtgcccctagggtccctcgcgcccaaaagattgaacttaaatgcccccctcccaacagcgctttaaaagcgacttctcttgaggtaggagaggcgggagaactgaagtttccgcccccgccccacagggcaaggacacagcgcggttttttccacgcagcacccttctcggagacccattgcgatggccgctccgtgttcctcggtgggccagagctgaaccttgaggggctaggttcagctttctcgcgccctcccccatgggggtgagaccctcgcagacctaaccctgccccgggatgcaccggttatttgggggggcgtgagacccagtgcactccggtcccaaatgtagcaggtgtaaccgtaacccacccccaacccgtttcccggttcaggaccactttttgtaatacttttgtaatctattcctgtaaataagagttgctttgccagagcaggagcccctggggctgtatttatctctgaggcatggtgtgtggtgctacagggaatttgtacgtttataccgcaggcgggcgagccgcgggcgctcgctcaggtgatcaaaataaaggcgctaatttataccgccgtggctccggctttccctggacatgggtgtgggatcc

SEQ ID NO: 46 - DNA, 3287 bp, Homo Sapiens
gaacacttctggttcagagtgctgcagatttatgaattgttgtttgctgaaataaggtgtaaagtttattttgtctaaagtttttaacaggagtgataattcaggcaaaatgttcacataatagtgggaaatcaaaagcttgcgatacagaaaagtgatatatatttgtaaactcctttaacaaaggcatcgtagcataagcatgactgtagagccagactgtcaatgttcaaattttttctgggccttaatttctttatctgaaaatcgttaacagtggaacctagttgatagggttgttgtggagcaagcgttcttaatctggagtccatgaaatttcagcatctgtgaactttgtattgaaaaaatcgtaactttatgtctattaacctcacaacagtttcgtttctttgaattataaaggcaggcaacaaaccacagtagtattatcagtacctacaactttgtttcctacagaaattattttcatactcagtaagttgttgcagatatcttgaacaattatacgtatatattccttaagtattatatatataatatttttatattctgtatatatttttggagacagggttttgctctgtctcccaggctggagtgctgtagcatgatcggaactcactgtaacctcaaactcctgggctctagtgatccttccagcctcagtcttggaatagctaggactacaagtactccccaccatacccagctgttaatttttttttttttcgtaaagacaaggtctcactatcttgcccaggctgctctccaactcttggacacaagcctcctgcataggtctcccaaagcattgggtttacaggtgtgagccaccgtgcctggctaatactatgtatttaatttcatgcgtttagaaatatgtgctattttaagaaggcgtctacaggttttatcacattaccaaaggtgttcatggcacaagtgaagaaatctctagatactagagtaataaaaaccatgatgcattagaacggatcaggcccatatcaaacgttcaacatacagtctgctgctatggttctttttttttttttttttttttttttgagacagagtctcattctgtctcccaggctggagtgcagtggagtgatctcggctcactgcaacctctgcctcccgggtttatgccattctcctgcctcagcctcccaagtagaggaactgcaaggcgctccaccatgcccggctactttttgtatttttagtagaaatggggtttccccatgttacggcaggctggtcttgaactcctgacctcaggtgagccacctgcctcagcctcccaaagtgctgggattacaggcatgagccaccatgtccagtctgctatggttcttaaaatattcatagaatagaaattgaagtaagtctattcgtttttatattaaaagtagctagtacggtgctctgtacttatgcactccatggatgctgaatgagtcattgaatgaagtggagtctaggttgtgcctcaggccttccagtggggctggaaggaacagttgtgaagttgtggggcggcttctgtgcatcgggggactctggagttagatggtttcccagggctctgaaggagaagagctgtgttcctaataatgatctcaatgggaatagagattgctggggaccgcaggggccaggttgtcattccccaaagcttccccttcatcatccaagaaggcattcaggtctttctgtgctaggccccaggtaaagtgctggactacccagtaattgggttcagtagcaggatggcctcagattgaggtcccagggccaaaggaccactcctctcctcagcgctggtccgggaaaggcaagctccgggcgggagcgcacgccgcgcccccgaagcctggctccctcgccacgcccacttcctgcccccatcccgcgcctttccaggtcttctcccggtgaaccggatgctctgtcagtctcctcctctgcgtcctcggccgcggcccgggtccctcgcaaagccgctgccatcccggagggcccagccagcgggctcccggaggctggccgggcaggcgtggtgcgcggtaggagctgggcgcgcacggctaccgcgcgtggaggagacactgccctgccgcgatgggggcccggggcgctccttcacgccgtaggcaagcggggcggcggctgcggtacctgccccaccgggagctttcccttccttctcctgctgctgctgctctgcatccagctcgggggaggacagaagaaaaaggaggtagaatggatccccttggccttcccctgtgggcgggggcgggccagggtgggccgcgttgccaggcagccctgccgtgttgctaggcagcctggtcgccggcgtgggcgatgccggcgctggggcgggagccgcgagggtgggaggccctggggcgtttccgggacgtggagttagcagggttctgacttgaaaaacgacggcaaagcgtgttcttgactgcttctgagcacctcacacctttcagacccagggcgcctttattcccagctggaagcccagcttagagcaatggtgccactaaaaggggtgtgttggatgtgaaaataccctttggaagtatttataagcctgcaggaaatatgttttccttattttcttactctgctcccttcattacccatttcaagaagcaacagaacctgtgcagagtgtgttttaagttacactgtatgtttatttttgtttatgttgaactcggtgtatacttgtgagaataagcttgcattttttattttgtgcaagtacaacagaacatattgagagtgtgttttaagttatcctgtatgtttactttacgttgaactcagtgtatacttgtgaaaataacctgccatttattttatgtggatttatttctgaagttcattcaatctgatttcaatcttaatccaccattaactttgaaaaggttgagatttgaagtgactggttgtatttaaagtaggtggagtgtttgtaagttctaattatccatcatggatagttgatctagctgcttcagcaaaaatagttatttcgggaatgtgactagggtttctaattgtggaccattttggtgagagttatctgcttacataattgaagatagtttttcctggttaagttgtacacctacacagggctcaaaatctgaattgggtttaagatattaacaaaattttaatagctgggtagagacagtgaaaaaataccctcatatgcagagtgattgtttccc

SEQ ID NO: 47 - DNA, 6343 bp, Homo Sapiens
gattgcctatcctcgccaccagctgaaggcaaggccgttctgctacgagcgcctcttaatctctacaaaatgaaaagaaaaaaagggaggattattagcccattactcagaggaatggggaggctgcaaaaatcgtcgatgggcagaggtgaagatgtctttctcggactgcactttccggtgtcctgtaactagagttcagttgtgggacttgttgaagaaatttgattttcttgcctcggcgagatttcaaaaaccagaaatagaaattctcagagtcagagaggaaatacaattaaacagcacgtgggcattttccccctcatttctctccccttaaataacactgctttgagtttccactgggtaaagagagaaagtttgagttttcacggatgttacgtggaggttagaaatggcttaaaatgtagatctctaatcagttttcttcgtggctgaagaggctaaccctttccataaaatgagtccatctgtcgactgttagctatttcaaagtgaagggatttagcactcaaaacaaattgagcaagtttgtttgcctgtttttactgctaactcaaatgaattcaaaacacggagtaattcaagaaaacacataacatgttccagacagcccccaaaagtagggaaagcccagcacctatatagtgactagggttagttttaagcgccaagcttttttaaacgtatctattttatgcacattctcccgagtcactatatatttctaaaattgcgagtattggtatattgatttaggaagagcaatacaacttttagagggaactttattctcaattagggaccaaagagatgtctttttaatagcgggcctgagttttgctctcaagcaggaattaatattggtgggaaaatccgaatccaggagcaatggctgtgttccggcactttccaaaaacatacattaacaggatgcccttgagattgaaaaaacattgtcccatatgcctggcagaagccttcacacctggtcctccaggcgaattatatttatagtccttccactcagaggcaggacagagccaaaatattctgctcactaccaaaatacacatctttgctcaagtcaagaaatcagaaaatcagggttcagaagtaaggcacacttttcgagtgagaatatgccctgtaatttcacatactctttgctttgcaggagcaaatgtggacttgagggaaactctctcccccacccccacttctatcccgtgcaatttaataccatcctcgccaggaaccttaacctcgtcattttaaaaaatgagatatccgtgacccagggtgaacttgttgaatgtaggtacagcagaggaaattctagactctatgagcgtctgagccttgtccagtgcaaacccttcgtgaacactgggtcagtgcgtggccgtgcccacctgtgcgccgacactctcagcatgcctggtccacccgccttgacctcgggcgcggtgtcccagctaagctgggcccagcgtcccggccttccccagctgacaagcctagctcgttcgctcccggctgtggccctcccaccctctcccactagctcactccattcttctagatttctcttcactcatcctctcccatccccaccgcgcccacctccactcccgccctctaccggtctctcactttcctccctccgcagtccctctttgctgtgacctctttcctcaactctgcaggcctgaaagaaggtcacacacgcacgctcacacccacactccacacgcctcgtcccaaacaaccccatgaacattgtcctttgttccgtctcttgggccactttccctgtcgcttcctcccagcccgtcctgatttgctccccaaaagtacgtttctgtctccccgctgccctggcgctccccctttgatttattagggctgccgggttggcgcagattgctttttcttctcttccatcccatcctcccttctggtcctcctttccacagtgggagtccgtgctcctgctcctcggttggctcctaagtgccccgccaggtcccctctcctttcgctctcccggctccggctcccgactcttcggcccgctggcatctgcttccctcccctgcctcgtttctcgtcgcccctgctcgctccccccggcgctcgcccgggcgctgtgctcgctcctggatcgccagccgcgcagcgggctcgccggcgcccgcgcgccactgtgcagtggagtttggtggaatctctgctgacgtcacgtcactccccacacggagtaggagcagagggaagagagagggatgagagggagggagaggagagagagtgcgagaccgagcgagaaagctggagaggagcagaaagaaactgccagtggcggctagatttcggaggccccagtgcacccgtggactccttcggaacttggcaccctcaggagccctgcagtcctctcaggcccggctttcgggcgcttgccgtgcagccggaggctcggctcgctggaaatcgccccgggaagcagtgggacgcggagacagcagctctctcccggtagccggtaagtggaggccatctatcccgcagggatgtgagataatgcgagtctggaaatttgttccacttcggagaatcttcaccgtaggtgatttgtggcttttggggctaagtttcgcccaaggtaacgcagtcggcaaacagaccttgcaaagccctgttcctttcgtcccccgccacagacactaacaatctacagggtgctgaagtcgagagggaagccagaccgtggctggcatttaaaacgaggtatcttcccttaaatctcggtgccaacactgcaggaacaaatcctcgggccaaggattagcattctcaagataaagggctgggtacaaagtttcagctactggaagattagcccccttcccattgttatccattgggaaaaaaaagaaaagaaaaagattccatcttaactggcagttagtgacctctcaggcccaagcgaattacctgggagccaggcctggatgccaagctctcaccatttctttggattgtaactcctttaaattgatcaccagtcaactccaatctggcacttcaggagatacactttaaatggatgcagagaattattttccagctggagattaagaaaaaaattttcgattctaaacctccgaaatatgttcctcttttccagtttaaccactttactttcttaagcaatttagaaatcaaactatcataaggtggtgtgatttttttttactcttttgtgtgagtattgtcttactaaactaaacggaaaaaacttttaccattataaatgtaaatatcagaattcatacattctaaaatatttttatgaaaaattaatctgatttaaagaaatttccttgcatttgttttagtctatcaatcaaaactaaagatgcttttatcacacaaaatatcattttggcagaaatccatctaaaattcaaataccaataatatcaagaaaacaaagcacataagcaaaataaattgaagatttttgttgatgtaacatgagcatacaacatttcaataaccaaactttccctaaaaaattaaatagccacttcatttgtggaatgttttactttaactcagcaaaattacacttaaattatttaggtgctttgttccttaagttaagcgtgtttgtcttcaaatgttcctaaagcacttatattaattggttgtaaagaacgcatacacatggtaaaatacagaactgaactgagcagtattttaatttccttaaataattacttactacaaattaatttactggctaatttcacaatttagttcatttaaaacacatgttcctgtgctgtttatttttaaactttccattaaagattttgttatggggtaacaaagtgtatgaaaaggggggaaatgtgaaaggatctgggattattcgaactgtatttttcctgcactttcagtcttgcggtagtcatcagaaattattttttagcaaattgttttatttcttagggcttgcctgcctgctttgccatggttcctcgtcctccgttagccgtgtagtgctttttgtgtgctcacaatataaaacccaagttggccaaaacaagagtccttggcatatacattccaactagaacatgaactttgggggtgagaactacctcccatcaggaaaagtctcccatctcaatttgtgagattagccattgaagccagttccgaagtctggcagccaaatttctcacagaagacttgtcttgatagggcaagtttaaggatcagcaggcgggaattggaggtctctttttaaaaaattatcttccccagttatttagactcagttcttctagtaggcctggtcattaaatgaagcataaaaatgcaagtctcaaggctcattttgactgcaaaataaatctccaagtcacaaggacatgtaggagtgagctaaggaacacgccttgaccttcttttcagtccttagagtggagctctatgagttcttgaagatttgttttgtattgctttgtttggtcttcagcactgaagcacggggaagtggggggaagaatgtgtaataattgactgactttacaccaagcaacgcaatctttttcttttgtatatttcattctttaaaaaaaataaataaataaaaactatttgcagttaccatctgcagtgctccggctaccagctaataatgcagccagttcagacatataaaaaaaaaagattatcgaaatgatgatgacatgcaaatttcctccgaaattatcataagtaaacatttgaagtctggactaataaaatcccatctgtgttacttcatatcgagttagtagaaagctgtgataatgaattttgtaatatctcacgaacagacatctcaatcagggactaatcctgtgattttactgcagaatcactaaatctggagccgccaaactgctacttctgggcccacgggcccacaaggatcgaatcggcagagtccccgcccgcgttctcgctagcgggtgggggaaccgcctggccgtccccaccctggatccccacgccacagcgccgggcagcccctcctgtaggcagcgaccttggccagaggctccccagggcccagctcccttcaggagaggccgagacgcagggaaacggtactcaggccagaggcaggcccgcagctccctgccccgcctctgtgcctccgccaacccgacaacgcttgctcccaccccgatccccgcacccgcgcgaagtgggccctccggtcgtcggcgtaccctggttagcgtggagagaggcaggcgctgagatcgaaggggcctagggagccctggaccttcttttcttgtctttaaagcaaccgcggctcttctacccacccggtggagcccctcgagacccacctctcccggcttgcctgtggcagagaagggggagcgcgttaaatgcttggctcgctgcgttgtggttgaaaacgtgaaaaagatttggctcgcccgggagagaaagggggagaactgggtagcagttataccagagctatttctccgtccttggcgggcagtaaaccctccaagaacgtttgccctgctctcctcagtctcgctcagtccacccagtgtctctcctctgcgatcttaaatcatactttagggtaattatttgtagtaagtaaataaatggccgggttagtatctctaggagaaagtgtggctaaatatggaaaagtggctcctgatggatgagaggcccgaactcagctcgctcctgaaacaccctaggccaagagcccgttcgtttcagaattacagaaaaccgagggaaactgctgtctaggacaggggcacgttggcgctgatgttctacaaatgtttaccgagctccaactaatggacaagcactgaagggtggtctttgcatacagcttcccaaagagaaaagtcctctccacccacccactcccgctgccattgcgttcagatgagttcttaaccccggcaccgagattcttgaaagtaggtccacagcctccccagcacactgtggctttatagtcctctaacctctgggcacttttgcggcaactctggagggagatcccctcttgataaataaatgtcctgggcccgaggctaggctggagatgctgctgcacatgccagaggctgtcaggtcggaaaaacacgcctgaagcctagcacacagtaggcgcctaacagctagtgtaacgtagtctcatctgagccctgctcactcgacggccgccgcttcttacagccttccttctcttctgttttgcaga

SEQ ID NO: 48 - DNA, 5333 bp, Homo Sapiens
tgggatgcctgcctgtggtcccagccacttgggaggctgaggcgggaggatctcttgagtccaggagtttgaggctgcagtgagctatgatcgtgccactgcactgcagtcggagcgagagagcaagatctcatcagggtttacaggaagccaatcttctccaggatcaaggacatgctatatcagccttctcagcactccttctctcacactggaggcaggacatgccatatctggactttgggtttctctgggacatagtctgcaaattattcctctttgtgaacccacagcccagcaagcagggactggcatagggcaggtctcaatacttatttgttaagtaatggcctggccaggtcaccgtgatcaaggtggagtaggaaggcctgaactttggcacaaaaagaaagaagtttcacatgcagacttcggggagcatgggagtgtaaggaagaaggggatagcacagagctacatgagggcaggggccccagagcaccacagaggtgaggccctcagtcctgcaggtccagaaagagcatgccccttgatccaggtacctggaattaacttgcctctccagggcttgagaaaacctgaatgcaactcgtgaatttcctttgagaagtgttaacttccaacaggactttggggtagtctgggagcaggctatcttccaaagcaagcaaagaaatgaataaagcttccccagctctgcctcctcagccaatcgcctctggcctccgaagccccatcctgccatagcccacttccaggtcccttgtgcagatggctgcccaccatatttggctttcatggactgattctctaaaggcctgggagtactgaccaggctggagggaagggcaggctcctgaggccttacagtccctaggaagttgcgtatctgcccaacccctgctctccaccctgcagactgtaaggtttacaagagccaggccctatcatcatcctttctagtctgtttctaagttggaacagagtacggaatgggtacacaggagccagcacagtggttgcgatggtttaagtttgaagccggggcgctgacccagtgaggtcacctggaactgtgcccctttccccttaccagctgggagtctgacatgcttttccattggcgaagacctagctggctctcccctcaccctcttcatacccgctctccagctctccccctccctcctgcccccaccacctcagatccaccagcctttccagctgtcactcaaggcatcatcctgctccctcacctccagtcactggcttcccaggatctctgaatcaagtccctcctctgcatcccacagccactgtcctagaccagggcacctgctcctaggttgtcagagtgactgtcccatcatgcacagctgatcgtgttgttccctggttccaaatccttcagcaacttcccatcactcacagaactggttcaatctcctcagctaggatcttgtcctagcacactccttgggtatcatttctcatgaattccctcttaaatctgaaaatggccaaaattagttcccaaacaggcttttgcaagagctatcttttctgtttcaagtgtcccccgtaccccaccacctacaaccctaaatccctggtgaatttccactgcttttgcaggtcccagctgtgggctctcctttccagaatgtctccgtttgcaggcttgctcttccattacatctacggctcttagaaagcaggggctgcgtgtggctcatctttgtacgcccagctcccggcaggacgtggcacgaagcagtgccagtgtgaacggatgaatggatcaaagccgggagcagggctgcccccctgcagctctgccctacctctcccgctttaccgtaagtcagcggtaggtctgcagctctccgcctctacctcctccccgctctgggcgtgtctttaaaacccacagtcggcctctctgccccctagaaccgcccccagcttctgtctcacttcctctccagaggcgggccctgagccggcacctcccctttcggacagctcaagggactcagccaactggctcacgcctccccttcagcttctcttcacgcactccaagatctaaaccgagaatcgaaactaagctggggtccatggagcctgcacccgcccgatctccgaggccccagcaggaccccgcccggccccaggagcccaccatgcctccccccgagaccccctctgaaggccgccagcccagccccagccccagccctacagaggtactattgggttaggggatgatggggttaagctttgttggtttgctgtggtggggagaggcgggaagagagggtctaacggaggatttggtcaagtaccctagagagtgacacaaagcgggaagtccagacaccagggtcctgaccgtctcgggtggggcagggaagggagggtaggatagagtagaaaagaggacacggaggagttggggcggcctcgctgggctgcggtttctccactgagcagttgggcaaggtgagaagggtcagtggcctccgggcctgggcccttccgcccaccctcgagccctgcctcaactttgcctcagatgcaggacttcagattagggaggatggaggtagtacccctgttgcgctggcctggagccaggggcatgtcccaggcacggcaaaactaaaaccaacttcccagatccgaggtgagaaactggctcagactgaagaggtatctttgccaaggcctcccagctcatgtggtttctgcttaaggaagcctccccaacgaacccttctcttgccacacctttcctgcccacctcccacctcccccgacaaaggaactacttgggtttcttgctctgctgcctttcaggcccttttactccccttcatgaaagtacagaggacaccgtattacagtaacttttataaacattattacaactaagaataacattacttaacaatactaggtaacatttatgagcacttcaaatgtgccaggtactgtattaagcactttggtttttttttgttgttgtttgtttgttttgctttgttttttgtttgtttgtttatctgtttgtttttgagacggagtctcacactgtcgcccaggctggagtgcaatggtgcgatctcggctcactgcaacctcctccttccgggttcacgccattctcctgcctcagcctcccgagtagctgggattacaggccacgccaccatacctggctattttttatatttttagtagagatggggtttcactatgttggccagattggtctctaactcctgacctcgtgatccacccacctcggcctcccaaagtgctgggattacaggcatgagccaccatgcccggcctgtttttgtattttacaaaatgtggtaaaatatacctaatggataagttcctatgttaaccatttataagtgtaccattcagtggcattaagtagattcacaatattgtgtaaccatcaccaccatctatttccagaactttttcattactccagaaactctgtactctttaaaccataggggagggaaagatggcttgcctccacccttctagtttccttggctgggctatgaattaaatagcctatgaattaaatagtcataaaatagattaccagcggaaaacccatatttaattacatatgtatactcaggagtcccacaatatatgagactcaaagaaaggtcagatgattgaagcctgtataacatcctgagctacggaaaagagcttggagcttctgggtgatggtgataacacaagttatgggagggtgaggagaggagctgtttggtgaatagaggttgtcttgctatgtagattaaaagttcttagataataaaagttgtctggagcagccctcttttaatatagatcattttactaatgtagattttcttttaagatataaatgcctttcttttttacaaaaggagagcttttcagagctattcctgtatcagcagtttctcagaataaccagcttaaaatatgccaaagaagtatatttcaagagcctcctgcagtcatactttgaagtggtgtgtcctgagccccagtaatgcaatagctcctcattttctccttcccctagcccttggtaacttctaatctaccttctgtccctatgaacttacttattctagatatttcatgtaagtggaattgttaccagtagaggatcttgactgcaaattgttcaggttcttggcattttgaacaaagaattggacaaaatgtacagcaaagcaaggaaagagtgaagcaatgaaagcagagatttattgaaaatgaaagtacaccccacagggtgggagcggctagagcagggctcaaggaccccagttacagaatcttctgggttccaaataccccctagaggtttcccattggccacttggtgttcaccccattggttgcagaaagcaaccaaccagacgtactttcaattttccatctgccctgcaggaaatggggtgatttgcaaagagagtagcctctcttccttttgttactgaggcatggagagttgcggttttcctttcgatttagttctaggaagtcagagggaatcggccttaggttccctgcctccagaccctattctcctgcctcagaatcatacagtgtttgaccttttgtgactggcttatttcacttagcataatgtcattgaggtctatctatgttgtagcatgtatcagaatttcatttctttctaacgctgagtaatattccattatatgtgtagaccacattttgtttatctattcatctgttgatggatacttggattgtttctacattttgtctattgtgaatagtgttgctgtggacattgttgtacaagtatctgtttgggccttgtttttacatcttttggttatatatctaagagtggaatttctgggtcatattgttgttccatgcttacctctttaatgaacccccaaactgtgcattaagcactttatatgaggttggtacttagtgtatctaccttccaaactgagttccttgaaggcagaatgtatcctacacctcttatatctcagagcctattactgtgggtgatgagaagtagatgctcaataaatggtgcagtgagagctggagggcctgaataaatgggggtattggggtgctgataagccagggttttgcatcatccaatgactggctggaatggaatatgaggtcctactccagggtccagctgtaagggtggttggccggtaggtgggggcttttgggacttctccaggcctcacctgcctctctggtcccccagc

SEQ ID NO: 49 - DNA, 5013 bp, Homo Sapiens
tagtacagagatgatgaatacttctgatattacaataaaatgactcctaaaataatatctacgaaaaagaagccagggctgggacccagtggctcatgtttgtaatcccagcactttgggaggctggggttagaggatcgcctgtggccaggagattgagaccaccttgggtctccataaccaccttttatgtagagatgtggtaagacctcatctctacattaaaaaaaaaaaaacacccagacacatcagactatacgctgtatgcttacctatatgaagactattgtttaggggccgggcacggtggctcacacctgtaatcccaacactttgggaggtcgaggcgggtggatctcttgaggtcaggagttcgagatcagcctggccaacatggtgaaaccccgtctctaccaaaaatagaaaaattagccgggtccagtggacagcgcctgtaatctcagctactcaggaggctgaggcagagaattgcttcaacctgggaggcagaggttgcagtgagctaaaatcacaccactgcactccagcctgggtgatagagtgagactccatctgaaaaaaacaaaaaaaaaaacaaaaaaccagactatattgtttagggataaatagttgacaaaataatagagacaagcaagacataattaccataaaaatcaggacctggggttgggggtggagagggaaggtttaagtggaaagaatggagtggtgacaatgtgtgtcaacctgggccatggtgaccctggggttcgctttgtaattcctcaaaatgagcatttatgtgctattcacttttcagagggtagaatctctgaaccaaaatgtttaagcaaccatatattaaaaaaagaaaaaatatggacagatttgtattttaattaaaacatttaaaaaatagagacaagggtctcgctatgttgctgagagtggtctcaaactcttgggattcaattgatcctcccgcctcagtctcccaaagcgctgagactccaggcgtgaaccaccgcgcccgacctggaaagatacatacatatatatatatatatattttttttttttttttttttttttttgagatagagtttagctcttgttgcccaggctcgagtgcaatggctcgatctcagctcactgcaaactccgcctccagggttcaaacgattctcctgcctcagcctcccgagtagctgggattacaggcgcctcaccacacccggccaatttctgtatttttagtagagacgaggttttaccatgttggccaggctagtctcgaactcctgacctcaggtgatccgcccgcctcggcctcccaaagtgctgggattacaggcgtgagccacggcgcccggcctggataaatcttttaaaacataaaagtctgagtgagtccctggccggccggcacagatgccggggtggggccgtgaaccggttgggacgcgctcgctccggcctggggggacccgggccagcagccggtcgccgcgcgtgcgcactgggcggggggccccgcgctcctacctgcacgtggccagcgcccggcgctgggccgtagctcctgccgtgcacgttggggagccggtacatgcaggtgggaagctccacacggagaggcgcgccgcccccgtgatagggctttacctggtacatcggcatggcagaaccaaagcaaaagggggtagcgcgtgccaaaggccaacgctcagaaaccgtcagaggtcacgacggagaccggccacctcccttctgaccctgctgcgggcgttcgggaaaacgcagtccggtgtgctctgattggcccaggctctttgacgtcacgaagtcgacctttgacagagccaataggcgaaaaggagagacgggaagtatttttgccgccccgcccggaaagggtggagcacaacgtcgaaagcagccaatgggagttcaggaggcggagcgcctgtgggagccctggagggaactttcccagtccccgaggcggatcgggtgttgcatccatggagcgagctgagagctcgaggtgagcggggctcgcagtcttccggtgtcccctctcgcgcgccctctttgagacccacggcattccaacctccctggaaatggggggaacatggccgaggcgcgtggcgaggcagccccctggaggccccggagtggcgacctcagtgttgcagcgatctcgtgccccttgggtgcgccttgaggccgaggcaagctccttcggggtcctgggctgcgggcaaaggattcggccctgtgaggagttgggttcggcctgtcccagacaggccttgcccacatcccatcacagggccgtggacttgaagcgggagcgtgaaatccccatagactgaatgcatttcctttctacctgttctctctccccttttatttttatttttatagtattttatttttaatttttttttgtagagacggggatttcgctgcgttgcccaggctggtctcgaacgcctgagctcaagcaatccgcccgccttggcccctcaaagtgctggaattaaaggcatgatgcaccgtgcctggcctttttaaaaaattaaggttattttggggacggtagagcgtccagacacatccttatttgcatagctgcgcagtttttaaaaatgcaatacgtttctacctgttaggatgtgtgatttctggctggtaagctacaccgaatcttggctagcacatttgcattccatgtcagatttgtaaacgcaaatttgctctctgcatttaaatatattagatatatttaggtaactacatttaaatgtattgagacatttaaataaatttggggtctgtgtctaaatgcgctccctcctcaaaataaatatctgaagtgggccgagagcggtgactcacgcctataatcccagcactttgggaggccaaggcgggtggatcatgaagtcaggagttcatgaccagcctggccaacatggtgaaatccgtttctactaaaaatacaaaaattaactgggcatgatggcgggagcctgtaatcctagctactttggaggctgaggcaggagaatcgctggaacccaggaggcggaggttgcagtgagctgagatcgtgccactgcagtccggcctgggcaacgcagcaagactcggtctcaaaaaaaaaaaaaaaaaaaaatcagaagtggacctgtagcctatagtgtgctgccaaataaacttatttttagagatacttctttccattttctgtgaggtcatctgcagtttcacatggtagacagacttaggtgagattcttagcaaggtggaatgaagagtaaagaggtttgtttatttcagaagggtttattaaaggcctacgatgtgttaaatgctgtaggaaatacccagtgatttctctttcatggaggtttcctgccttctcttaacaagttatcaattaaactgtttgctggaaattgctaagttaatgaacacacgggatacattctttgagcagacattgtttgggcagaggaggaagaggagagcggtttagacagagacctgcttatacactgtagtgtctcaaagagcttgtgatgttcaggacagttgttcactgtgctacaatataggggatggctggttgcggtcccctgtaatcctagcactttgggaggccgaggcaggcggatcacctgaggtcaggagttcgagaccagcctggccaacatggtgaaaccctatctcttctaaaaacacaaaaattagctgggtgtgatggtgggcgcctgtaatcccagctacttgggaggctgagataggagaatcgcttgaacctgggaggcggaggttgcagtgagctgagctcatgccattgccctctagcataggcaacggggtgagactctgtctcaaataataacaataataacaataataataataataataataataatgtaggggacttgatgaagggaaaggattagagagattctgaaaagaaggtagttttggccccaatgatgactaaattttaactttcatatagtaggaagtggggcactagtaaatttttaagcagaaaaattatttgaccagatttgtgatttcaaaaatagctctggtgatagagtggaggatgtattggagcagggaataaggggagataaaacctttataaaactcttaaagctagtacagcaagagctttgagggtctttgctaagacagcagctggcagcttcagtttggagtggggtatcaaaggcaactgtgtataaggaatagttatataactggtacccaatttctgagatgattttgacttaaacattgtgtatttcccagcatactgttggtttttctaattatgttgggaaattatgttactttcatttttttttttgctcgttgcccaggctggagtgcaatgccgcaatctcagctcactgcaacctccgcctcctggatttaagcgattctcctgcctcagcctcctgagtagctaggattacaggtgcccaccaccatgcctggctaattttttgtatttttagtaaagacggggtttcaccgtgttggccaggctggtgtcgaactcctgacctcaagttatccacccatctctgcttcccaaagtgctgggattacaggcatgagccaccacagccagccatgctttcacttttcaagaaagaagacaccattgttgccaaagattttggtaatttgagagatacaatgtatgttttctccatgtggatcttagtataattagatagtaaggatctgttgaatttgaagtatctatccagaagtattttgggtacatgtttaaggattgtaaaacagtgtttctatttctggatataataaatgtatttgctaatataataaatgaatagattagacccataaattatttacagtgttgagtcatttcccacagttaaaatcaggatgaaaatatatagctgaatacttgatttgtttcttgtaactgatttctctagt

SEQ ID NO: 50 - DNA, 3683 bp, Homo Sapiens
ggcatcagttcattggtggagacgctgtgcctaggcaggtgttctttcaaaagcatcttatctaaattgttgtgattccaaaacaggaatgtcttgcagggctatttcgaaaagtcccgagacagccaaccctttttaaaaatatagatggggtcttgctatatcactcaggctagtcttcaattcctggcctcaggggatcctccaaccttggcctcccaaagtgctgggattacaggggtgagccaccacacccagcttcctgagacagcttttatctcagccatgtaagcatgagcccttccctttcataccctcagggttttactttgggtcaacaaatagtgagtttattttggtatgtgcaactttcaaacacccatcgccataaaagaaaggaccagccttggccaggcacagtggctgatgcctgcaatcccagcactttgggaggccgaggtgggcggatcatgagttcaggagatcaagaccatcctggctaacacgtgaaaccctgtctctattaaaaacaaaaaaattagccaggcatggtagcgggcacctgtagtcccagtacttgggaggctgaggcgagagaatggcatgaacccgggaggcggagcttgcagtgagccgagatcgcgccactgcactccagcctgggcaagagcgagactccgtctcaaaaaaaaaaaataaataaataaaggaccagcctcgactgacagtcggcactccgcaggcatcctccacaatcctctctcctctctgcctcttgccctacaacctggccatgccatgattcctccctacctgtcctcctctgtggacttcatgaccacgctctgtcctatgaggctggaccagggtcatgttcactcacttctctcccctccctgccatttgttccactccccaacttgttctccacgcatcgatctcaatggagcaacagcaatcagatgatgaaaataaataatggtggccagtcttcaaatggatccccttttcaatcccgcactatccatctgctgccttctcatcagccctctgctcccgtttctttcccttctcaaactggacaagcaccgtactccgtgaagatgtgtgcagcctgttcccatgccctgaacaccatcccttcaagctcctctggctgctccctgctcaggtctcagaaaaggagagctgggcaaccctcccagggagccgcccgcctgtgtaactttcagtaccagcctgtttgctttcttgagataattagctacaacggccactttaaaacaatggtctccttattttgttttttgttttcaccctaaactttataaagtcagaaatcgtaagtccttgagcatccacagccactcaaggacaaacctttgctgaatgcctcaagcaaagagggggaggctgagtctctgtttccagggtgaaaacacgacggtttttatcagccctgttttatgcgacaatcccaggtcgaatctggatcaatgcaatgacttcctttgtatggacctatgttttgttcgtgcattcatctgtgcagctgggaacccgcagctctgttcactggcatggggatgcctcggggaatggcagggcagagccacaaaaagccagcctcaccacgcggcctgttgctcttagccaccatgcccatcatagcctgtggcaggagatgttggggtcccccccccgacccctttcaggaaaacagagtttgtggaggcggagtacttcccaggcctgactgataaaacaattcaaaagactcaaagagattcctcgcctgtcccgtcccttgaagggccttgaacacggggtccttccgcttggctcctagcccgtccctctccccttaccaggaaaggatcctccccatctctgcagaagcctgaccatccccctagagggcctgggaggaagtgggttttgcatacagtccctgttgactctagtgccccctgctggccccagacgcgagttccggcgaggcttcagggtacagctcccccgcagccagaagccgggcctgcagcgcctcagcaccgctccgggacaccccacccgcttcccaggcgtgacctgtcaacaggtttgtattggcgacaaaaggagcagccctgaatgtagggaaagcagggcggagtcctctgcaggctcgggggaggggaggggcgtgaatgcgtggatttctgtggagagtggaaacacggggagtcgaggggagcatgcgcgggcctcagaaagttttgggaaaccgactcctgggagcagggaggaacgcgcgctccagagagtaagttaattgactcccggggggtggtctcttcagcccggggggttacagacagtaggtaaatccagagattacccagccaagggcaggggcatcttttctagacttgcggggcggggtggggcgagacttgagctcaggggacctggaaccggcccctgcaccccgcatcccactgaagaaaagggaggtcgccagaagcacagacccaggacagagtccagacttggacgtctccgtgatcccagaacaccccgtcccacactcccagtcagccccccgcctccccattcgcccaccgcaccccctttttccaccctgcccccaccctactgtctggtgggaaaggccgcagccatcacgtattcacccatccccacccctcaccccccaccttctgactttctttccacatccccaccccctcccccactctctgcctcttttccctccccctccccaaccctttgtttttcttacacatccccacccctcccccaacctctgtcttctctcatccccacccccaccctgtttcccttcccccattcccgccctggcccgccttctgtctcccttcccccatccccacccctcccccccttctgtctcccttcccccatccccacccctcccccgccttgtctaccttccgccatcctcacccctcccccaccctgtctcccttcccccaccccacccctcccccaccctctgtctccgttcctaatccccacgcctccaccactctttgtttcccttcccccatcccgaccccccaccccaccctgtgttccttcctccatccccccccactgtctttcttctcggttccccaccctgtctcccttcccgcatgcccacccctcccccaccctgtctcccttcccccatgcccacccctcccccaccctgtctccctttccccatgcccacccctcccccaccctgtcttccttcccccatgcccacccctcccccaccctgtcttccttcccccattcctaaccctcctcccgccccccttccccacccccatctcccctccttccccacccccatctgctccccacccccagcctcctctgctctccaacttcctctccccttttcccctcctcctgctcccttctcctctgctcctccccccactgcccctcccccactgcccctcctcctcccagtctttgaaaacaagcccctctcgactctctgggcgacctcactggatctcgtgagattttgccctggaaggactgagaaacggggattggtcagaccaggctgcccagccccccggcccccaccgccgccccccccgccccacgcagcggctagggcgcttagctgagccattgtctcgttctttccttccagc

SEQ ID NO: 51 - DNA, 4110 bp, Homo Sapiens
tagttctacttcctaagggaaatgaaaaaacaataaattcccagactggtgttgatgctcattctctttaagcgggtcgactacttgctttgtagatccttgacgggtggggtgcggggtaggagtgcgatccaactctcagcatttccgaatcagctctctcacggtgacaggtcagcccaatcggggctgtaaacagacttgacaggtttgttctgggctgacggccattgactaggttctcagaccagataagtcacttggctgagtccacagtaggtggggcgcgctcaccagctcaggggtagtgactggacgtttgttgcaacatcggagaatgcacgctctgggctgcagcaggagataccctcaagcacagaaccaaaagggttcaccctaagcggcagggcatcagcgatggagaggcccgagagccctagcgcccagctccttttcccacgtttgggaaggcgcagaataggtcgatgtagagcaaggagtgagtctcaggtctcagtcctttggcttgctcttagggtagcaggcgaggagtggcaccagtttggggactctctccccgcgttctgtaagaatcggcggcagccagcaggcggggaggcgggggcacgtgtttggatgtgggtgcttgtgtaaccagttccccaagcgccagccccgacagcgctccttcgggaggctggtccgagcccctgtttccgccgcggcgcaggaagggttggggttccgctgcctgcaccaggcaagagcaccccgagcaaaggaagaagacgacttgcctccggagctatcactggggagtgggaatttggaaagttccccaactagggacacacgtgacctccttcggaaagtagttccgactgtggcccgtgtatccttccacctccttttgaaccctcctaggtctcctcgccccgcccactcgctgggctgcagcttcctaccgttccgtactttccactcaacccggtaaccccaaacgtgcacggtccggccggggcgcgcggagcctggccccgggcgatccatcctgccgggttttcacggcggccaagggggggcggggctaggtggtctctgagaaccgagcttgactccgacgccgcgaaccgacctggagcccgaggggaaagatgctcgactctcttgggggcaccggagcgggcgcaggagaggcctgcggggtgcgtcccactcacagggatcctctttcagttcatttagataggtgccctttgggcccttgaaattcaacggctatgtgttcacgttcagcacgctcggctgagagctttcatttttagggcaaacgagccgagttaccggggaagcgagaggtggggcgctgcaagggagccggatgaggtgatacacgctggcgacacaatagcaggttgctctttgtgctaagactgacaccatgaggacacagatttgggggaagggggaatctctaggcaaaggctgttacagtcaaatctctgcgaacgattgtgatccgacagcggtgcaaaaggaaagagcgaatgcagtccacgccgcggaaatctaggggtagaggcaaggggggagggtattccccttgcagggaccgtccctgcatttccctctacactgagcagcgtggtcacctggtccttttcacctgtgcacaggtaacctcagactcgagtcagtgacactgctcaacgcacccatctcagctttcatcatcagtcctccacccccgccccacaacagcctaccctgcctccggctgggtttctgggcagaggccgaggcttagctcgttatcctcgcctcgcgttgctgcaaaagccgcagcaagtgcagctgcaggctggcggctgggaaccggcccgagcaagccccaggcagctacactgggcatgctcagtagagcctgcggcttggggactctgcgctcgcacccagagctaccgctctgccccctcctaccgccccctgccctgccctgccctcccctcgcccggcgcggtcccgtccgcctctcgctcgcctcccgcctcccctcggtcttccgaggcgcccgggctcccggcgcggcggcggagggggcgggcaggccggcgggcggtgatgtggcgggactctttatgcgctgcggcaggatacgcgctcggcgctgggacgcgactgcgctcagttctctcctctcggaagctgcagccatgatggaagtttgagagttgagccgctgtgaggcgaggccgggctcaggcgagggagatgagagacggcggcggccgcggcccggagcccctctcagcgcctgtgagcagccgcgggggcagcgccctcggggagccggccggcctgcggcggcggcagcggcggcgtttctcgcctcctcttcgtcttttctaaccgtgcagcctcttcctcggcttctcctgaaagggaaggtggaagccgtgggctcgggcgggagccggctgaggcgcggcggcggcggcggcacctcccgctcctggagcgggggggagaagcggcggcggcggcggccgcggcggctgcagctccagggagggggtctgagtcgcctgtcaccatttccagggctgggaacgccggagagttggtctctccccttctactgcctccaacacggcggcggcggcggcggcacatccagggacccgggccggttttaaacctcccgtccgccgccgccgcaccccccgtggcccgggctccggaggccgccggcggaggcagccgttcggaggattattcgtcttctccccattccgctgccgccgctgccaggcctctggctgctgaggagaagcaggcccagtcgctgcaaccatccagcagccgccgcagcagccattacccggctgcggtccagagccaagcggcggcagagcgaggggcatcagctaccgccaagtccagagccatttccatcctgcagaagaagccccgccaccagcagcttctgccatctctctcctcctttttcttcagccacaggctcccagacatgacagccatcatcaaagagatcgttagcagaaacaaaaggagatatcaagaggatggattcgacttagacttgacctgtatccatttctgcggctgctcctctttacctttctgtcactctcttagaacgtgggagtagacggatgcgaaaatgtccgtagtttgggtgactataacatttaaccctggtcaggttgctaggtcatatattttgtgtttcctttctgtgtattcaacctagggtgtgtttggctagacggaactcttgcctggttgcaagtgtcaagccaccgattgctttcttaggctatctatatggtctcttcctgagggctattgtccgttaatacagaatacagtacactgttagtggattagcgagctcggtaatccggtctcctaaatgaacaaaaaagtagacgctttttgaggttgagcatatttcgattaaatcttggcttaggccctagatcaagggtttagatcagaataaaatgaaaattagtgttgcacgtacgcatattgcatcagaatcttgcagtgattgttttagtttcctgagttgcattgatagattcttttaaaatatgactgatttgcataactttagaagcagaatcattttcagtatatatggtgcacattgagggcaaaaagtagttttgttaatgtttaaacttaagttacctacaactttgaactgtatgtagaagttttgtagtttgaagtcaatagtgccataatataccttataaggcgttcttactagatctttgttatatttacctttttctctccctatggggtgatgtaggatagtgcttgaaatttgcacttcagtagcatttaatgttcagtgctcttgtcataaacatagaatggatattgagtagtttctgatcccagatggtaatgtgtaggttcaagggtattgtgtgtagcaagtgaagattgcagaaataaaacttcagttcatgcttgaaatttaagtattgttgtgatgccagaattgctgctcaccgtttttaggtttcaggtcctctgacaccttttggtatcgttaattttactgatttg

SEQ ID NO: 52 - DNA, 5507 bp, Homo Sapiens
aaacaagtgaaaacctcagctcagcttaggtcagctccagggctggccaaatcagaggctcatttataacactgaggatccagattcttttgaaattcctcctgcaccaatatcagcatttctaccttctctgtaggttggcttgcctcacgttacaatggctgcagcaatcagaagtgtcacatcctcagtaatacttaatattattactattatttaataatatttagaactgtgccatccctgtttcaatttatcaggctcccagcagactactccttatctttcaaatgtcaaaactgcatcctgagctcttgcctaaactaatctggggtgaggtgaatggaagtagcactttaattgtattcattctttgtagctggacctgggcctgggccctatctcctgacatttgcccacaagaaagatttctgaagttaggtaggactggctgttgagtaggccagtgcttgccaaacctttacacatcctcacatatgtcataatatgcagataaaaagataatcccttatacaacttgctgggataaactcaggaggcttacagccatgacctgcttgaaggttcttcctgccttagaccttgctcagctgctccaggatgaggggatttacatcacagcacaactgtattttattcacagcataaaccatctctttccttctcagttgacgagttcagatgggcaataacagtgtctgccaaagagaaaaaaaaatgtattcaaactagataatctattggtacaaataccgagacacagaagtgataacagctttaagccaatgtttgatggtggtagtcccagcaagctcttttctgatgtctttgtgcctttgcacatgctccttctctgtcactgttttcttcatcaaacataatataatggacaagtggaatcaaatagaattgagttcaaattctctgctacccatcggccctggtattggacaaattaactcctctgagcctgtttcctcatctgcaacgtagactagctaatactacccattggaaagcgttgtttcttagctaatgcatgcaaggcttaaaacctagatgacgggttgataggtgcagcaaacctccatggcatacgtatgcctatgtaacaaacctacacgttctgcacttgtatcccggaacttaaagtaaaaaaaaaaaaaaaaaaagaaaagaaagaaagaaaaagaaaaaaaaggctgtttctggggattaaataagacaattatgtaaggtggccagcacagttcctggtacatagtaaatgtcaggcctgcctgacagacttctattcagcagctactgctcccctgaaaatcttcctcagacgtttccacggtgcttcccgttcttacaccactacaatcctttattacactactatccgttcattccccacagctccctcccttcctttccctaaccagtgatcccaaaaggccagcaagtgtctaacattttctatcttctaagtgactggtaaagttccgcacctatcagcgctccaagtttgtttttgttttggccgactttgcaaaacggattgggcgggatgagaggtggggggcgccgcccaaggagggagagtggcgctcccgccgagggtgcactagccagatattccctgcggggcccgagagtcttccctatcagaccccgggatagggatgaggcccacagtcacccaccagactctttgtatagccccgttaagtgcaccccggcctggagggggtggttctgggtagaagcacgtccgggccgcgccggatgcctcctggaaggcgcctggacccacgccaggtttcccagtttaattcctcatgacttagcgtcccagcccgcgcaccgaccagcgccccagttccccacagacgccggcgggcccgggagcctcgcggacgtgacgccgcgggcggaagtgacgttttcccgcggttggacgcggcgctcagttgccgggcgggggagggcgcgtccggtttttctcaggggacgttgaaattatttttgtaacgggagtcgggagaggacggggcgtgccccgacgtgcgcgcgcgtcgtcctccccggcgctcctccacagctcgctggctcccgccgcggaaaggcgtcatgccgcccaaaaccccccgaaaaacggccgccaccgccgccgctgccgccgcggaacccccggcaccgccgccgccgccccctcctgaggaggacccagagcaggacagcggcccggaggacctgcctctcgtcaggtgagcgagcagagccgccgtcgcctcacgcgggaagggcgccccgggtgtgcgtagggcgggcgccaaggcggctcggcggggatccgtcctcgccaggggccgggtcccggcgggaggaggcgccctccctgccccccgccacggcggagcgtctgcagaatggtgacaggattctgggttcttgggcgaggggtctcggcttcaacttgacaggtgtcgggcgggtggggctagggtcctgagcgaagtgacaggtgcagttccctcttgtgaggctcggaggcagagggtcgttgcgagcgtccatcagacgcaaaaaatgaaaaataaaaatacaaaaatggtgtctgtgggagagtttttcaccggagaattggagtactccggtggtcgtctgactttctgttttggttcacgcgatgcaacagttgggaagtattttcttccgggcgtgcactgcatctgaagtccatttgtgggagaggccgaccagaaagccttggacaagaagcgcagggtcctgagtgtccattgcccacaggatactcggctcaggagctttgcggcgtttccttagaacaataatgcatcgaggccttggggactcaaagccatctgtagtgattgatggagcgtaactctttagaggaactgaaacatgggcaaaactttcatgagacatttaccagaagtgcttgaaagtttctaaacttttttttttcctgtttgatgaactcttcttgcgtgttagtcggcttcggcttgtctcattatttcttccattttgccttttgactttgaaccagcaaggatcttggtgtcccctctttttgcctttgtttttggcacaaaattagtggttctgtgcgcaaatggaaattttcgttttcccttattaagtggaatctaaatttaagcaagtccatacgaatgcactagatcttgaagggaagtatttattgtattacaacatcttacttttcttgatttttctactttatggttaaatagctatgattgaaagagtgtaattgtcattattgtcagcactggttctactttgagacaagttcattgcagagggaatgggacttgtttctgtttttcactattttctctcccattcttgtctatcaccaaatcctttcaccctcacccatttctttccactcggtatacactaacaattcacggcagaaaagattgaagtgggatttaggaaatggcccctggaaggctattaaaaatttatatatttaaatggactgtcttataggtcagttaaaaaccatattcgttaaaaaaccaaaataacaacaacaaaaaattaaaaaccacgtctggggcatgttctgggaaaagacatggctttagtttctgattaaattctgatgtatccaattcttgcaaatttcccttgggaaaatgcagtaatggctactctaaagaattccatgttatgcacacagctttggaagcatactctaatgtagggtaaccaggaatattgacgttgtggccactgcttggaaaaaagaggactgtttctttcattttttaactcattttatatattttaagtaatggaactataaaaaattctcttataagtcaaaaccatacaagatacagtctgttcttgattatccatacccacaaagggtttcattaacatagacagttgaactctataaattaaccagcaagggtagaaccgctgccgtgcagtctgatactgagcatcttgcctggagatggaatcaaggctcagtccaactgcacctccagtgacagattccattcctgatttgagagtttagatcttatttctgttgccttatctctggcctaagtaatgtagctggaagggaaactgtcactaggaacagcataccacattcattgttgaaataatcaaaggttaatcatgtttcgagctgggtgtgatggcgcgtacctgtagtccatgctactcaggaggctgaggcaggaggatcacatgagcttgggagttggaggccagcctgggcaacaaagcaagaccccagtctttaaaaaaacaaaaaagctgaccaggcatgttggctcacgcctgtaatgccagcactttgggaggccaagatgggaagattgcttgaggccaggagtttgagaggagcctgggcaacaaaacaagaccctgtctctaaaacaaattttaaaaaattagccagtggctgtggcacacctgtaggctcatctactcaggaggctgaggtgggaggatcccttgagcccaggagtttgagactgcagtgagccatgatttcaccactgcaccccagcctggatgacagagtgaaaccctatttcaaaacaagaaaaaaaaacaaaaactaattatgttttgaaggaggaattggcagtctagaatagtggtcaagggcatggattatagagttagactgttgggctcacatagtggtttacctcttaccggctgagacctcaggtaagttctttaacttctccaatttgacagacatctgtaaatgtctacttttacagatgagaatacttatctaaaagggctgatgtcgggattcagtgaaaccatatgtttaaggtactttctacaggatcatagtaaatactcaaaaattattaattattcttcatactattcttattagtagataacacatagaaattagatgaatgaaaatgaattagccaacaagaatttattaaatgcttgtctttgttaaggggaaaggacaaaaataagcagtcgcatcatgtaagatgtgctagtaggtagagagatatatgaaacattgataagagaagactacagtttaacaaagtcactggcgttgaattgtataatattatctatgggtttttatctttttgttgttatctttatcctattttcccaaacagctttagctattacatttactttccttcacagaagtgttttgctgctttgaagtatatttgacttaccatgcaagcaaatatttttcactgtgtggtatccttattttggaatgaccatgaaaaagataatcatatgtttaaatttgaagtgtaatgtttttctaagataaaataagatcttaaagtatttaataatgttctttttcacagtagtgttatgtgcaaactattgaaacaagtatgtactgaatcaatttgatttataagtatatgccaattatatgattattttcatttggtagg

SEQ ID NO: 53 - DNA, 6289 bp, Homo Sapiens
cttctgttcttgccccatagtcaccttgagactcatcacttagccaactccaaaagcattgctgattactgtgaattttactaaggttttcttaagagggttccattgtctcaaaattgttcctgaaatatcctgttacctgtctacctgattttctcctatcttcagagttccatttcctgtcctcccgcctgtcattataccttccataagcccctacttttgtcccagcacttttccctctgtcagtttacatatcccaccaagcaaaacaaaaatagcaaaacagtaatgccttctgaatcctcaaattgctcaatcctcagattgctcctcaatctggaaaatgttttatatcaagcccatttataaatcaaggattggcaatttaaaaaattaaaataaagaaaggagaattggaaataaaatgaattggctgggcacggtggctcacgcctgtaatcccagaactttgggaggccgaggtgggtggatcacttgaggtcaggagttcgagaccagcctggccaacatggtgaaaccctgcctgtactgaaaatacaaaaattagctgggtgcggtggcgcacacctgtaatcccagatactcaggaggctgaggcaggagaatcgcttgaacccaggaggcggaggttgcagtgagccgagatcgtgccactacactccagcctgggcaacagagccagactctgtctcaaaaaaaaaaaaaaagtttaattcacgcagagccagctgaacggcagacaggagtttggttattcaaatcagcctaccagaaaattcggagactggggtttttaaagaatgacttggcgggtagggggccagggattggcgaatgctaatttgtcaggtgggaggtgaaatcacagggggttgaagtgggctcttgctgtcttctgttactgagtggaattgcagaacttgttgagccagattatggtctgagtggcgccagctagtgcatcggaatgcgcggtctgaaaagtatctccagcaccaatcttaggttttacaatagtgatgttatccctgagagcaattggggaggtcaggaatcttatagcctctggctgcaagcctcctaaatcataatttctaatcttgtggctaatttgttagttctacaaaggcagactgatccccaggcaagaatggggtttgtttttggaaaggactgttacaatctttgtttcaaagtgaaattagaaattaaattcctcctgtagttagttaggtcttcgcccaggaatgaacaagggcagctcggaagtgagaagcgtggagtcatttaggtcagatcccttgcactgtcataactttctcactgttaggatttttgcaaaggcagtttcgtgaacgtacagagacaggcccttgctattatccctattttttagataaggatatccaggcgatgaggaagttttacttctgggaacagcctggatacgaaaccttcacacgtcagtgtcttttggacattttctcgtcagtacagccctgttgaatgttctcacggtggggaggtacgtgtttaaaatgcggggaaggtgcttttatttcacccctggtgaaactaggggagctaatttttttaaacatgatttttggcccccttgaaccgccggcctggactacgtttcccagcagcccgtgctcaagactacgggtgcctgcaggcggtcagcgtcgtttgcggcggcgcaggcgcggtgcgggcggcggacgggcgggcgcttcgccgtttgaatggctgcgggcccgggccctcacctcacctgaggtccggccgcccaggggtgcgctatgccgtcgggaggtgaccagtcgccaccgcccccgcctccccctccggcggcggcagcctcggatgaggaggaggaggacgacggcgaggcggaagacgccgcgccgcctgccgagtcgcccacccctcagatccagcagcggttcgacgagctgtgcagccgcctcaacatggacgaggcggcgcgggccgaggcctgggacagctaccgcagcatgagcgaaagctacacgctggaggtgcgctcgcgggcggaggggcgcttccggcctagttggcgtgaaccggtgccttccgagccgcgtcgcgcgcctcgagagactctcgggcgggttgcgggctcccagccccgagaggggtggggacttcctctgcgctattccgaggctcttagccgctccgagggctaacccgctctcgccgcgctttcctgcggcttccgaatggggaacgcgtcttgccctaaagtagcacagcaaggctgagatcgcgctggggtcccgttgaggaaaatgggtgtgtgtggcccatctgaccccccgcccgccttgttagtagaatgaactagtgtcgttgtcaagaccacacggacaaggggaggggacttgcccttatttgcaccgcgattaaccgggttgtggcacctgggtctccaggcgtctccgtctgttcgcttccccctgttaaccaaattgcctttgccctggcgttgcgggcgtttgagtcaacgtgctgatgcgttttgggctgtgtttacgtctgtgtaaacaaattaatactcatttccccccaggccagatgaaatgagccctccgccgacccggatgtagacacatgcccccatttgtcactaggatcaggactgtggctacctcgagggctttttggtcaccccgggcattgcacaggactcctgttgttgttgcgatccgggtgtgttaggtcgcagccttcggacagggcttgcagatgagaaaaatggccattctagccagtgagtgtcagctttgtatgcacctccccttcatgggccaatgggaagtgacacggaagtacggattgtttatcagctgtttgactgtgtgtgtggcatttaaacctgaggccatttgatttctcaagtcgttttataattaatttgtagaaagagtcgggcaaataggtccaggatgcaaagcctaaccaaggtattatttaaatatgatgtttttggctatgtgtactgatgagtgaggttatttttaatttgtatttgcattaatagaattttaattcaattactagttccctctttgaattgttaggtctgcagaagatagtgtatggtggctttagaacccgacagacctgaaaccgctggaaaagttcagtatggtgatctctaaactggagatatttgtgtttacctcacagagctgttctgaagattaaataaggcaataatgtagtttctggcacataaagcacccatatggacagtgttttcaagtttactaagctctttgtatatttacatgatctggctgagtaagctatgttcctattcatctctcagtgcctttctgtagtctggcaaagagaaggactggttggctttttatgttgttttttgttttttgggtttttttttggtaaatggccttaaaggcttccaaacaagctcttattttaccctcaagataatcctgtaaatcagatagaacaagcattatcgccatttatttgaggtatttcaactcatagcagttaagttgtatgaagtctagtgatacatgagcaagtatcacgtaatagctggttagtaaattatttttgaaaacatgtttgattactcaattcttttgattactgagactttagtttcagcttcttagcccagtttattcagtaaatgatttactcagtaaaatattcatcaaatatttcttgagcacctattacttgctacacattgttctaggtgctggatatagagcagcaaacctgctcttgtggggcttacagtgaggtacgctgtgacaatatgggatgtcattctcatgggagtgcaagggaaaataaagctcttatgatgtttaatacagaatactggttatggaattttaacttgatttcttgtattttctgtgcatttttaacctgtaactcattctcacagtcctcagccaagaaaatgcagcctctgagactgttaagtaatttccccactgtgttatagctactgtatggcagagccggaatttgaaaccagatctatttgaccctagaagatgtgaccatgagatgttaattttgaggataacttttttagtattatggaattttcaacatatattttttaggaccaaagataaactaggcacagagtctactctttgcataaattatttaaaagagcttcgcgctccattttgtcatctaagcactgtaaaattctcacaagactaattcttctttttaggaacgatatagttgtaaactttctattttttttctttttttttttctccctccaccatccaagtagttgtgaattttctagagccaaaatagaacattatagattatcttttaaaccctttattgaagcagaggataatgctgtgaccgacttaactttatgctttctaagagatattgatatagtagagaaatgcagtagttatgcatctaaatttgcttttacatcataaatcaagaatattatgaaaccatctcccagagatatatgtgatacacagatcttggctgttttttttttttttacaaaagaacatctatgctattgatacatataagtgggtttgtaagacagtctatgtgtaaatgtgaaaaaaggaagaatttccagttcttctcattttcatttagaccagtaatgaatacattgaagctaaaggacatcttccatccttcctcgcttttatagggagaggaaagttgtatcacttcttgagtaaaaagaattgtgacgatcttttacaaacaatgccttaaaaattattatttttgaatgatatctggtagtggatccacaatagtctcatttggttatacaaataaattttatgtattcatgtatgtgttttgattaggtataaaattagtggctgaatatccattcaagcttaattttgtatttctatcacttttctagattttgagcaagattaaaaatataaacaataggccaggcgcaggggctcacgcctgtaatcccagcactttgggaggtctaggtgggcgagtcacgaggtcaggagatcaagaccatcctggctaacacattgaaacccagtctctactaaaaatacaaaaaattagctgagcgtggtggtgggcacctgtagtcccagctactcaggaggctgaggcaggagaatggtgtgaacctgggaggcagagcttggagtgagccaagatggagccactgtactccagcctgggtgacacagtgagactccatctcaaaaaaaataaaaaataaataaaaataaacaataatattgtttgcattactatggctatatagcaaattgccttaaaacttaggggcagaaagcaatttgttttggtcacaggttctgtgagtaaggaattcaggctggggacagtgtggatgtcatgtttctgcgtcaaaatgactggtacctcacctggaagacttgagcaactaggtactggcacagctggagctcgttgggcatctctgtatgtttgttccatgtggtctcaccagcatggtgatccagggtagctaaattcttacatgttggttcaggactccgaaggcacatgtcctaagagagagaaccaagtggaatctatactgccttgtataatcttttagaattacatagtttcacttctacctctgcaattattgatagagacagttaatcagtgtgagggaacgcagacccttgcccaggtccaaggtgagggaaccctctctacctctcagtggaataatgttaatgtcacattataagaagagcctacggggctgggtacagtggctcacacctgtaatcccagcactttggaaggccaaggcggatggatcacttgaggccaggagttcaagaccagcctgggcaacatgacaaaaccctgtctctacaaaaaatacaaaaattagccaggtatggtggcgcacttctgtagtcccagctacttgggaggctaaggtaggaggagtgcttgaacctgggaggtggaggttgcagtgagccaagattgcgccactgcactccagcctgggtgacagagcaagattccatctcaaaaaaaaaaaaaaaaaaaaaaaaaaaaagagcgtatgagatagggtcatcattgaaactaagtttcccacaaaaatataaacaacactttcaatttaaacatacttttaaaaatattgaaatatttatatgtagctttttaactaaaaatcaattttcttttcttttacagg

SEQ ID NO: 54 - DNA, 14491 bp, Homo Sapiens
cattgcttacctttaaatctgtggaaaccccgtggtcagcatttgaagtttgctttactgccaaggttctctgccacaagagacttttattctttgataataattaagaggtggaaaaagggaagtcactaccaattctccactccacaaagtatatgaattcataatatgccaacagtggccaaaatgtcctacttctaaggctatgttacacccttagaaagatttatacataagtcagggagagacagggttaggcttcttttgtacttcgatcatcgtagaatgcccaccttcacaccctgcaataattccaacagtacgtgtgcttggggacccagagaattttacagtctccatatagcacccccctccacttcttccctcaacctgctcccaccaatgcactgttaggaggatgaagggtaaggaggacacacaactttctcttataaagggtggaagcttaccctaagaatggaaataaacttgcagaccagttctcagagagatcaaacttttgaaaaagttcaaaatctggtagatgaagcccttagaacagacgtcagccactctgagaccagcgtcagagtggtctcagagtggctgaggcccaccgcctatttttgttcagcccactgctaagaatggtttttgcatttttattttttatttttttgagacggagttttgctctgttgcccaggctggagtgcagtggggagatctcagttcactgcaacctccgcccctcgggttcaaacgattctcctgcctcagcctccagagcagttgggattacaggcgcaggcaaccatgcctggataatttttgtattttgtagagacggggtttcagcatgttggccaggctggtctcaaactcctgagctcaagtgatccgccgcctcagcctcccaaagtgctgggattacaggcatgactcactgcatccggcctgcatttttattataaaatgtcatttatttatttatttatttatttatttatttatttatttatttttgagacagggtctcactcggtcacccaggctggagtgcagtgagcgatcatggctcactgcaactttcacctctctggctcaagcagtcctcccacctcagcctccagagtagctgggccacaggggtgcaccacaatgcctggttaatttctttaaaaactttttgtagagatgggggtctcattatggttgcccaggctggtctccaattcctgggctcaagggatcctcctattcctcggcctcccaaagtgctgggattacaggcgtgagccatagagcccagccgatttttgcatgtttaaatggttgggaataaagtcaaaagaataataatatttcgtgacacatgaaaattatattaaattcaaatgtcggtgtctataaataatgttttattaggacctagctgccctcattcctttagtatttatggctgcttttgagctacgacgctcgagtttgaatagttgccacagggatcgtatggcccgcaaaacctaaaatatttagccctttacagaatagtttgctgtcccctgtcttaacacggttcacatcccatttgggaagttctgtgtcttcagaggggagcacacccggtatgaaggctggtctaaactcaacaccctagggaagtccttcccgtccctgggccttagtttccccaactataaaatggggttagccgcagtgatctctggggacctgcctggcagtgggtcaaataaataaagggagttggacctcccggagggtaggactaggggttgagtaggagccggcgggctcgggcagggcgggtcccttggggtttccaactccgcgggcgggcgcagtgccccgcaggcctcgcttccactggggaattccgggcggggtgcgggcggcggggcgggggcgggccggggcggggccggtaggccgcctataagatgggtggcgcgcccgcccggggccactcgccgcagcctgcgcgccttctccagtccgcggtgccatggcccccgcccgtctgttcgcgctgctgctgttcttcgtaggcggagtcgccgagtcggtgggtgcttggaggttcccgggctgggggcgaagcgggggcgcaggccggtgcctcctttgttcgtcggagcgtgggatgggggggggcagatcgggggtacgctacccccaaccggacaccgaggcccgggaaactttgttggaaactttgctccggggtcacgggccagcctccgggatggcttcacgcgccgtgcgcccctcgcctgttgctcttcccgcctccccgggcctcagccccgccgcgggctacgggctcgttagtgactaagccggtgtcaactcttcaactcccacaccctcgtcccttccctggtgaccctggggcaggcttggagcgctgaatcccctcctcgctctcggggcgcccagagcagacagctttaggatccgagatggccctgggggtcggggggctgcgtgtactcggaagggggagggttttagggttgtgcgaggccctctttcacacaccaaggagaactgagccctaacctcagttctggccccagctctgtcattgacttgtgacttagggcaaagtcctgcccttctgaatctcttcccaatactgcaccaagggtctgagggaatggggcaagaggggacactgcgttagggtttctagaaagttggggactctgctcttttcgaggacagaggagaggaatggtttagactcaacacttagccaggagctgagcctctgctttctgcaagaagtgtgttcattttttctcaattgcagataagaaaattgaagcatccaccttgagtgaggtgaagggggtaggggggagagaaggcctcaatcagcccagggaaacctttccttctcactgtccactggcctccgtcatagctgtccctgggccagcagaagctctatccatgcccgcagccggcttaggaggaggggggcaatctcatctgggaagttggggggcatgggaattactggtgaaggcaatctgtcccccacagcctgagctttgtgccccctttgtgccctttagccccagttttcagagcgagtgagtccttgcagtttaaccattaatgttaatttctttgaaagccttggggctcctgttcctctgaatttacttagcggaaggttgattctgcctgcaggctcttcttgaggaatgaatgagaccctaggcaatacttccagcacaattccaggcatgccatgatgattgcaaacgtggagcgcctttgtcggggggccagacattgctctaataactttctaatgggtatatccaggagcttaattccaacaacaatcttactgtgtactgttcttaaactggtcctgaggctagagaggttaagtaacttgcccagggtcacacagttaatacacaataaatgggtgagtcagattgaaatttaggcagccaggctttcaagtttctgctttagcttaacttctactctttgtgctactccaggtgtcccatcgttggtaactaaagacgggtttagaataggttgagattttaggctggaaggcaaaggaattctgaggtggaaggaaacaaggccagagtgaggtgatgacttaacctaaaccaaaggctaccttgcctaaaatgttagtggctgaggacccaagccttctgcctctagcacagtgctctaaactaggccctgaaggatgtgtcgggtcaagcaactggggaagcatccgaagggataccacctaggcagtacagggaaaaagaggaaaggacccaggaggttgctgaggtcaccgtgtgcccagtcacatgccagtttcctcccaggggctgctgagccttcaggtgcttcagggtgctgagcagtcagctgtgtcctgggggcattctgaaggatgtagtttgggggaaggggactgtgtcagtcctgcctgggtgacccatcagctgcaggagacatcagccctgggcagctgcttcctgagataggtgtcaagtctcatcctgacctcagctctccccttcctggctaatgtcacagacctcctgcctgtaactggggcacagggcttcccctttggcctgtcccctccctcttttctagattgtggttggaaaaatcagacatagtcacggttggctcggactgaagagatgatccagcgtgtccttttctttttgcaggtagagaaaagtgaggcccagggagaaggactttgctaatagcagttaggagtgatagagtactttttatatgacagatctggtgcattttgtcctcacaaaaagacctgtcacatggggattctattatgcccacttcccaaatgtgagaggtaaaatggtactactttgggttagtagagggcatccaggaccccaggatctctgactagtagccctcccattgtgggtggtgttcccccgactgttccatcattccccttaccacccccatattttggaagggaacccaggctcagtacccagctgtcctctcctctgtttggctgggcttgctatactaaaccagttcttcctgtccagctgggagcattccctgatctgccttcctgccactccctctcaggccaattaaaggcagccttgttttgggagtcccctccacccaaaggtgttcctacccaggggcacagcctactgacttggccccgggcccaggcggttgtggggaagtgtcccccacctatcacctatcaagtgtactttagcttaaggacatttctggtcttctacagcgtcctcttcttgattacatgggagtaggggtgggggcggaagcctaggggcttctaggacccttgagtgaacagtgagagctcttgggacttcttgagcccagggagttatcaaacacccacgaaaatatttgggccatgatttggagggttccatgaggttggggggaggcctctttccccgctgggctgacatcccccaccttaaaatgaaaggtttgaacagggtagcctccagagtcctttccatctctcaatttgattaataacttaagtacctactattcaaaagaggtctctctcttgaaggaattaacttgagggaattaacatactccaccaaatgctgaatccctccctctctccccccgcacactgagggcaggaactctgctctatttgtttttgtgaaatacctgtcccctagtttgtactcaggaaatgcttgtatgaatgaataaattcgtgcatgtaactttattctaaatggttcattactgttatttattgctagtatgagtatctcccagtactgcgaggtaccattttctctatttttacaggaaattgatgctcggaacaatgcagtggcttcctaaggtcagaaccaggtccttctgatagggcaaggtgtctggtttgagtgtcctcagaatattccagatgaggaaatttgctgggtttgaaggtagataccttaggtcctacttctgcgttgctgggtgaccttgagcaaacatgccctgtctctgggtctcagtgtccccaactctaaaataaggaggctggaccattgccttccaagggtccttcctgcccagagagcccattgatgaggggaggggccctttgctggcctccttggtgaagagtctaaacaaatcccagtctcagaagagaagttggggtggcggggggacattcagctcctgccatccccagctcctagaaacagagggcttttccaaggacttggagtgctgagcctgcctgaatgaggagctggggaagccaggctgggctcccagccccatctccctgttgggagaagttggctcctagctgtccttcaacctcccggactggacaggcgagtgtgatttccaaatgaatgcttaaaattggggtaaggggctggaccgagcgctgtgagtcactgcatgctagcgtagcctgcctgagtcacccatttcctttcaaactcttggctaataggacagctctgtggtgggggtgttggaatgagctcagagttttaccttgtcctttgggagtcactgtttcagtgtccggggctcgaggggacatacaggacatgtttgtactaggtcccgcactttcacagccccttgcctgcatgtagactttgacattgtacattgtgcagccagtcctcaaaattgggctttagacctctgcagagcaggtagtacttttttcctctttaaggcaaaactgaggctgcaactggcctgcattttttcagagagcaaaagctggtactgttcaggtttggtgtgaccccaggattttctgatgtttgtgaggactcctctttgcttcctggggctggccagagggcattgaaacattggcttggtgttacacagacttaactccagacgtgcgaagtccacctcttactggctacatgaattcagtcatgctactccacctctgagccccagcctcctggtctgttaagaagatcatgataccggtgtggcgaagcttaaaggagacgacagggctgtaaataaaggcacctagtaccatgcctggtagggaggaggtgttacttagtgacagttcccttccttgcccaggccaccttcatgccagggggtcctatctctgaagattctgagcccaggtctcctggaaagctttctccatcccccttatcccccttatctacccccacagctgggaggtgggaagggagaaatctagggtggggcttttggagtccaaatctcctatttgtttatcttagaagtgggctgtttgctaattatcgaatgggtttatgtttaaacaagaaccagttctgggcagccccacctctcctgctgggatttgctggagcctcatgctgaacagtttgcagcctggagggagagggggcagggggtttgccaagggtatcagaccactctggacactgtccaggacctggggtcaccctcctgtgctggaggggcagagtttctacccttaaggaggctgagtgattgcaaatagcactttgaggggtggggtgttggtggacagaaaaggtacagtgttctgaaaagccagtttctcgtatgttttcactgcatggtgccctagagagggaggagagagaacacatatgtcaacagttggggtctcatttaaccttagaagaataagcctgacttcttgggcttgtttgtcattaactaacacagtggtgaccttgggcacattcttgcatctcactggggcctctctggtcccatctgctgaaggctgggtgactgaaaaagagggtacagaaaactccagcccccgtcctagctctgctgctcacccagggacacacacagttaatacgtcactttgttgatgtgaactccagtgtcctctataaaacacctgtggcactcaaaggtcatcatcgctgtttggcaaacttgtaaagttctggctttattagcacctagacgagggttcttaacccggccagagtttggctttggggaggtggtgtctgtgcatatgttgaaaatgtaaactaagagttacagttattggggtttagacctttttatccttttcagggggctgcagtactccccaaaaggtcactctgatctcagcagttctttctggctttgacctttctacagccatccttcctccctcccccacttcccagccttgttcttgcctcctgcttcccccaacccccaccttcagcccagaccttcctattcagcggcccccaccccttcaggctgcatctcacccctccccctgtcctccaggcccgggagctcggctgctccagttttctctggcacagtagaagaggctgctggtcaggtgacacctggggtaatggaaaggggaggcagggagaggctggtatgtgtggaaacagtgacttggtgaagcccagcagtcagtggccaggcctgcggggactggcggtgtcactctagcctctgggcgtgggggcagatgtggcacatggctggcccggctacccagagtggggatactccttgccttggagaagccctgccggagccgtctgtgggacagactgacctggtctggaggatggcttccttgggggtcggtgagggaggctgggaagaggcaggaagccagcacccagggctgatctaatcagctgagataaggctgcagcgtgggctctctactctgctctgagaacacaggaggtttgtttacatcccgagagcctccctagccctcggatccagcagggatttcggatctgctgcctagattacaagctccaacttcaatgcacctctgtctctgaggccctgagggagccagccccctcctggctgtctccaccggtaatcggagcaatgcccagcttggttactgggctgggacagagggaggcttgtctctttgagacctgtcttttacagattggaaaactgaggctcagagaagggaattgtccacgatcatccagggagttagtaacaagggtgctgggtcagctcctggcagggagacatccagaggctcctgaacccttcccccatttctagctggcaccctaggatcctggagttcttgctgtgggaatgggctgccctgaggcttggtgaaaagctggttgcaggcagtgccaggcctggctctctcctgagtgattgtgttcagagtaacccgaccttgaaggcgacatttgaaccctcactccacccccacccccagacctggtttaaccattcaggcaccagagcaccagaccatggattggtgtgtagtttctttttaccttctagatttttatttatttattttgtccctggggacccaggtccccaagtagaatttcaggtgtttctggtcactgtcatttgcaccttcggggaaaataaaaatggtctttacctctgtctgcttaggacaggtggtcaaagctgtgtgaccttgggcaggtctctgactatctctgtatctttttttcacagtctgaagggacctgattggttgttgaaaagtctctgggctcagaagcaaaatgataacctattatagattatattcctttacagtttgcaaagcaccatctccctgtccccaggctagcttccttccagcaacagaactgcctctgcaagttttcccaggcctctgatcctttgagcactgatcccactggccaggaggaaggcaggtaggggttaatcacagccactattcattgatcacgtgctgggtcccttgcacacacaaatgcattcctcttaatcctcatcaccctgcaaggtgctaccagccctagtcacaaaagaggaaactgaggatttcagagatgaaataaactcccaagctcatatagttaggaagtggcagaactcacacttgtgaatctgccttgatgcacaaccactctgggtggtagagtcacagttgtgggccccaggttttagccattctggggaatgtctggcccttaagaagtgggtggggtggggaagaacagttacgagtagtgtacgctgctgggggtctcctgctagaaatcattctggtgggtccaggtgttggagccccaggtactcaccatcccctctccccactaaatttggcttgcccagttattacccttctggtcttgcctcctgaaagaagggtcaagtgtgtccccgaccctacctcccctggggaggagccaggtcgggagaggctctcattagttcacagttatccaagccctgaccctgaactcctctctggtgccccagccaagtttctgttcctttgtttaagtgatatcactttcacctttgtttactcctaggcagggacagggttgccctggagccctggcccagccagtgtgttgtggactggcgggttaggctggagagaagtgaagagtgggtggcagtgagaagcctagttgtggttgggacgtgttcttgaggaagatctggatttgaatcccagctctagctttctagttgcatgacgttggataagtgactcagctgaacctcagtcttctcatctgcaaaatgggtagagcaccttgcaaggctgttttgccatttaaatgaacttgtataaacaaagtacccagcatggtgcttggcatgtagtggatactccttttagtcactcatgcttttcctggggtgatagaagccataggatttggggatagggttgggataggaccttttcgtagcttcatgcctatagccaaaagactagatggggagtataactgtaatgacagctgctgcctgtggatttgctgagacccttaggggcagccaacaccctggaaggggagagaagataattccagtctgggagccaggatacctaggttctaagtccatctccgctgccagctgcttggatgaccttggcaaaatcccttgtcttgtctgtttgctaggttataaaatcagataccttctgttggcaggtgttagtttctgtagaacaaaagagcacttcccctcccttctttctccccaacagtctggggaagaatgtagtatctctaaacccccaggcactaatcccagatccccaccagccacagggccagcagagtctgtgggacctaggcccattgccctattttttattttttggagacagggtcttcctctgtcacccaggctggagtgcagtggcacgatcgtagctcactgcaacctcgacctcctgggctcaagtgatcctcccacttcagcctcccgagtagctgggaccacaggcgtgcacaaccacatttggctaatttttgtagagatggggtttcaccatgttgcccaggctgatctcaaactcttgggctcaagtgagcctcccaccttggcctcccaaaatgttgggattaagccactgtgcctagccaccactgtcttacttagttggtaatttctgttgtgtgttcatgaaagggacaaagatacaaggagacttgagagcccagagagggtgcctgtgcatgtatacacacgaacacacatgcctgggcaaaggtggggtgagctgaggagaacagaccacattcttagccaggagcagggcggggtccatctctggtcagggctgggcctggctgctgggtggcctggttcttcaaagtcaccccagactcaatgggctttatctgaaaagagggcggaggagaggaggaccgttggtgccttcccaacctttacacaaaaaagagtgattgcccacaatcccacggggcttggtcccgtcttgctggcctagtcctaaatggctcttatccactttggagttgccttccctcttgtcagaggtcatgggtggagaagggaccaaaacagggcagagagggggcttccagagctcaaggagagatttaattccctgtgtcctcctatcaccactgggagctggaagaagtttcttcccagccccttgacttgctgtaggagggaaatcctgggctcatctaaatgcagcctttgaagactccatcttttcagagctttgaaataggatcgaatccaggccgtgccgcggagccccggggtgacttcagactagactagtttcttttttggaaactgagtataaaaatgaagggttaaggatgaacaggtgcccacaaagagggctgaactgggaataaatcttggtttcagccttggttttgctgctgacttggctgcaagatcttcacgccccactttcgctcatagccttcatttctctaatgtaaaacggaggtaattcctaacagccagtgggcatgctaatcccatgggttgttttgaaatacctcttagcactttcacatactgaaagagaggctggatgcataaacaaccttccatggctcctgggggcagtgaggggtgggaaaaggtctctcagcctgagacaagtctcctgatggaactacagcccctgttgaggactttgacctggtcaacagctggccaaagtgtaccattctttctttctcccggctagattgacccccctacttaacagggctcccttggagcctggggcaggctggtgaccccgtgtacatatgtgttcatgcgtgtgtttatgtgtttgtggttaaatgtccaggtcagtgaagcctgggttctggcccagtgtggctacttcctgcttgtgtggccttggacaagtgactttacttttctgagcccttgtttccatctctgcaaaaagggactattaaaaggacctagacaggctgtgtgcttggttaaggcctgtcacttgggttcttgggggatttgccacaggagatggaggtaggagcacagggaccctgcccttaggtataggcacttgggcagccatgaggagccttcctcctgctctgccaaaccaaagccacaggcacgggctatgtgcgggggcttgaattccagcaccagcagcccggcagctcctgattcccgagtcatgaagtcatctctgagcagcacttaacctctctggctttccacccccacgggtgccaagcgttcagcattctccccactccccgggagagagtgattcctggccactgccttccttgtggcctgaccccgctcccttccgggaatccagcattctccctctgtgggggtggaagagggtgcatgagggtcaggttccacctgcctctccccagaagcccagtggggagagtacaggagtggctctgaagcagctttcctgggcctctcctgcaatgataataaccttatcttagggacagatgttccttctcagacaccctcctttgtcaatggcagtctcagctgagtgaaggactgcctggggtgtccgaaacagagacctgacctctttctatcctgagttatgtagcgaacgctctgtgtgaccttgggcaagtccctgccctgttccgggctcagattcaagttgtgtgaaacgggaggacaggagctccttgggtcctggcattctgtgattctaagcagacccccagctcctgcagttatggcgtctggagaagatgggaatgtctttcagcgggaggggcatggtgtattgaacttaatgaaaaaccccaactctcctggcaaatactaggcactttagtgtttgaattaattagtagaataatgaactttgctcagagctgctgttctctgggcaaacagaagcctgagcccagaagctggaggaagggtgatgggcatccaaatgtttcctgtgctcttgagggtacattgttcccactcggtggagctacaggatgggagcagggtaactgatgtactgtagggctgcccgggacctttgacactttcttttggcaagcggtttggtgggagtggacctgagactctgtcctgatcagctgtgtctccacagggtagtggctgagtgatgattatgggtactggagtggatggtctgtgagggtagggattgtgcctctcggtgtctgcatggtgctggcagcagagtagatctgtgggagatgtttggaaggcaagactgaatccaggagtacactcctgagtcatcaggtctgggcagcgccctgacctgaggctgtcttagggtgtgcgtgaggcagccctgtctgtcccggcccagactgactcagctgggaaaagtatcctggactgggcaagaccagaaccaggagcccactccctgtcctgtgtgaatcagctgccactgcatcacagagccctggagtgtagcatcccagggccctgtgcatggagactcctggctctgaagtcaggcagccctgcgtatgcaatcctcgctcttccatctgccagctgtgtcaccaaaagaaaatgactccctcggctgtaaaaagaagtgaataacatgcctccagagttattaaaacagggcccagcacatagcaagtgctcggtaaaggatatctagccatattaataatttgattattacctcatttactgtttttattttttttgagacgggggtcccactctgtagctcaggctagagtgcaacggcgtgatcctggcttattgcaacctccgcctcccgggttcaagcaattctcctgtctcagcctcccgagtagctgggactacaggcgtaagccaccacgcccagctgatttttgtatttttagtagagacggggtttcaccatgttggccaggctggtcttgaactcctgacctcaagtgatctgcctgcctccgcctcccaaagtgttgggattacaggtgtgagccactgtgcccagcctcatgtactatttttatttgcccagaatggaaagagacttgcctaaggacacgcggtgagttagaggtagagtgggatccaggacgcaggtctccaggccctggcctggtctctttctagtttctgaatgcccacttcactagcttttgggcatcagctgtcatggagcactggggatgttggctgatgtgtctcctttctttatcttaga

SEQ ID NO: 55 - DNA, 2534 bp, Homo Sapiens
aggcaggaaagtgggacagccggggagctggaccccaccctctgtgagccccgctggtacctgatggcatgtggcttggagagggcaggtgacctggcgtggagggccagagggtaaatcctcaaacaagtggcaacaggccaccaacttgaaagggaaaattgtgtagtgatgggaaatgtgtccaacaaacctactgggtgactaattacaaaggctgggctggagcttcagaggctgcttgttaaacacttcattaagcggcactctgaaagctgccacctgcgcattctgggagctcagaggggaccctgagggggaatgaggcctggaggatggaaccatcttcaggtagactgagaaggagcctggatctcacttccaaacacagtctggagctcataggtcagaggcctcaatgggagaaaagctaaaggaagagggtgcagaaaggagtttcagggaattggtggctatgtgactttgagcaaatctcacccctctctgagacttagtgttcccatctctatggtcctgtgtgtgtcacagagacatggtggggattaaattcgatcgtgatatgaaagtgcttgggaaactccatggccctacctaaacatgagttatcctcacctgaaccaaggggggaagttacctggcaggattaggaaccccatcctcctgaacctttatgggctctgtcgaggctgaagcagccaggggctaaagccagtccttagcccctggaagggcactgtgaaagtggatctgatttgagaagccgtttcctgatgtgggcagccatgtgatgccagccccgaacaagagggggcagcctggagcctggaaaggtgccagtgcaggtggggcccacgcccagatttctcctgctgactgttctgatgattcacccccacatcccagcctttttacctttactgcagagccggaaagggtgtggggaagagaggagagggaggcaggtcttgggccctggtcccgccccctgctcctccccacccttctctgggcctggccacccagccaaaaggcaggccaagagcaggagagacacagagtccggcattggtcccaggcagcagttagcccgccgcccgcctgtgtgtccccagagccatggagagagccagtctgatccagaaggccaagctggcagagcaggccgaacgctatgaggacatggcagccttcatgaaaggcgccgtggagaagggcgaggagctctcctgcgaagagcgaaacctgctctcagtagcctataagaacgtggtgggcggccagagggctgcctggagggtgctgtccagtattgagcagaaaagcaacgaggagggctcggaggagaaggggcccgaggtgcgtgagtaccgggagaaggtggagactgagctccagggcgtgtgcgacaccgtgctgggcctgctggacagccacctcatcaaggaggccggggacgccgagagccgggtcttctacctgaagatgaagggtgactactaccgctacctggccgaggtggccaccggtgacgacaagaagcgcatcattgactcagcccggtcagcctaccaggaggccatggacatcagcaagaaggagatgccgcccaccaaccccatccgcctgggcctggccctgaacttttccgtcttccactacgagatcgccaacagccccgaggaggccatctctctggccaagaccactttcgacgaggccatggctgatctgcacaccctcagcgaggactcctacaaagacagcaccctcatcatgcagctgctgcgagacaacctgacactgtggacggccgacaacgccggggaagaggggggcgaggctccccaggagccccagagctgagtgttgcccgccaccgccccgccctgccccctccagtcccccaccctgccgagaggactagtatggggtgggaggccccacccttctcccctaggcgctgttcttgctccaaagggctccgtggagagggactggcagagctgaggccacctggggctggggatcccactcttcttgcagctgttgagcgcacctaaccactggtcatgcccccacccctgctctccgcacccgcttcctcccgaccccaggaccaggctacttctcccctcctcttgcctccctcctgcccctgctgcctctgatcgtaggaattgaggagtgtcccgccttgtggctgagaactggacagtggcaggggctggagatgggtgtgtgtgtgtgtgtgtgtgtgtgtgtgtgcgcgcgcgccagtgcaagaccgagactgagggaaagcatgtctgctgggtgtgaccatgtttcctctcaataaagttcccctgtgacactcctcctgtctctcttccagttcttggcgatgggctgggagtgggactggaatctgacttagagaccctgactttggacctctgagttagggccctgaactccctaggtggctcagtggcccgcacgcaagactttgagtccaggtgaggccggggtcc

SEQ ID NO: 56 - DNA, 3716 bp, Homo Sapiens
atccatttgcttatcctcagggaaatcagactaacaaagacttggaaaggaacataaaattctaaagctaggcttatggcctttataacccttagatggggcagataacatgccacggaggctcagagacagctctgagactatgcaatagctactgtttcccctcttgtggaatgttcacttaaaaaagctcaagggctctataagttgcccaatgaactccacagacatccttaattcattttcatttattggaaccctctctcaaataattttctaaatctcacgcaataatgatgtatattcttgctcaatattaagaagccctcatgcaaaactgaagaaataaattgttcttacaaaagaaggaaaaaggaattatattctcagaacattctgcttacccagacacacagatctgattcttgctccattgtttgtggcattctggatcctagggccattgatgaggctgggtcagtggccacactggctcctgggtaccccttccctggccacaaaagtccatcccagcagcactatttaaactggacttatttctcacttcacagctctggcctgggctgagacctccccaacagagcttattagcgagcttgtcatcttgctctgtggctatctaggtctggagtcaagagccattcacaggaaaatcagcatgaaacctttaagtttgcatattaaatattaacaccactaagggctacagtggaaaagaggtttgctgagctcaagggccctcactccacccccaacttcccttggcttttctcttctatgttgtgttcctggtaaatcccattatgtctcgactaccttaggccctctcagccccttcttgggaattaggctctctggataggcaaagaggcagatacccagctgccaggtgaatcagatgtcctcatcagatctcttaatttccactttggtgatatttcaaaggatcacaaattatgttcttagtgcctggtcagagaactgggaaagagctggaagatgagacaccaaactccatcccatggtgatgtttgaaccaggctggagctggtttcacatgtttttcattgtgcatgactttcttaattgccttagtgggaatgcgttactgcaaaataaagtgaaattgttttccttattgcttgtaatttacagaggggtggttttgatcatataaaccaggcacttttcaaatccattgatcttagggtggaaggagggatttctttttaagtattcatttcgaactatgctttcactagtaaactcaaagcccaagggcaaaaacccatgattctccattttgtaatagctattagatgtccacagcacatcagacctgtggaaaacgcatgctttgtgtatggaagagggagagggagcgtcaggagttgtcctttgccaaaaaacgtactctgacactcaaaggcacaggctggtggagatccagggaacccgggaaagcccaggcctaactcaggcccgcgcgggtctcttctgatcccataagatgaggagtgggtcctggctctgggcatcctggtgtcgactgtgagttcccagcagaggcccagagtcccggtccggcagccgagggaagcgggggggtcttccagaagaagaaagggccaaggtcaccccggtgcctctccagcagcagcagagggcggcggtcggtgtcgctgctggccggggcctcgaggaaggcgcgggccagctggggccgggtctgcgttcccaggagctgccaccgttccagggagcaagtcaggccgggacgtagcgcctgcgcgggaccctcacttgccaccaagacccccacaaaccccgccccatcctgccttacgccccgccccaaggtcgttctcccgacccggggtcccgccccaaggccgtcctcccgccccgccgcttggtggcggccgcatgctgcccggatataaagggtcggccccacatcccagggaccagcgagcggccttgagaggctctggctcttgcttcttaggcggcccgaggacgccatggccgagtgcccgacactcggggaggcagtcaccgaccacccggaccgcctgtgggcctgggagaagttcgtgtatttggacgagaagcagcacgcctggctgcccttaaccatcgaggtacagccagctttggagcggatggcgaggcagcaggggcagcccctgggagcttgggatgccctaggaagggcgaggactcaaggagcactcactatggggcagggaggatccccacagatgaagccactttgagccgggctctggaggatgaataggagttctccaggcagggaagaagggtgggaaaaccgcaaaggaatgtcggtcaaaggggtggacccagtgcctgtggagtgtgactataatgttgactacagcaggcattttctgggcttcggggtcctaatccttaaaaatgggtatctctaagtgactcatccatatggccgattatcggaatcatctcaggtgggtcccagaaatctgtatttttaaaaagaaccctcaacagtttagggtcaaccaggcatagcaaacactggcctagagtgtgaagtattttccactacctctgggctttatttagaaaacaaatttaacaagtgatgtcgtagtataagcgccggtattgaatcaatattgacttttttaatgtgtgatgccttaagatgggtccttaatccatgttaagtttttgttaaagaaatagataagtcttttacaagtatttggatttactcaatgaaaaagagtcaaaaaatgttcaaactctctccaaacatacactgaagaaagcataaaaattaaaaaatatattagaacacgtatgtccagtagcaatcaaaaattattgagtgttgactgtgtctctacagatgggaaactgaggcacaaaaatgtacatttgtccgaggtaagattgctagtaggtaatggggttggaattctaggctcttaaccaccacaaaatctgcatttttattggcatttcaattttttaaatatgtttttactttaaaaatcaagttaaatacttacttttttaaaatcaaaatttgaagaaataatttgaagattcagtggatttctttttttaaatctctgagaaatctcttcttcaacgtgacaccaaaaccacgaaccagacagtttttcataaaatcatgatacatgctccacaaaaaataacccactagcaaactgtgggacagattttgcctcacatcattgaaaaggccagtattctttttctctctttctttctttgttgttttttttttttcctgtagatacagggtctcgctctgtgacccaggctggtcttaaactcctggcctcaagcgatcctcctgcctctgccttccaaagcactggaattacaagtgtgagccgctgcaacccgccagaaaaaagtgtgcctttcatggccctgtctgggtggctagacacgtgtgtgtgctggtggtcctggcccagccagagtccctgagaggagcatgcatggcctaaggaagtgagcttcagggaacagtgatgaccatcatttcacactcggacccctgcccagatgggtggatggctggcaggagggattccggttttctgcgcctggagaagccctggcaagcggaacctgaaagtatgccctgtccttttcttctcctcaga

SEQ ID NO: 57 - DNA, 3432 bp, Homo Sapiens
ggaggatagaaatataaattaaagaatgacacaaataattataaagttacagctgttaaaagaaaagcatatggtgccaagagaacgtgtaatacaagatctactcatggaggtgagggaaagcttgcccatcaaagaagttatgattcaatccacgaagaccaggagttggctgggtgaagaaaaaaaggtcagaggaaggaagtccacactggggaaggctctaagcataaagggtaggaggattacagaggcatattcacgaaatttggagaaggctttcagtaagcaaggagaagccaaatgaaagtttacgggagagttggaggcttgaagacacgttcaaggatctggtttttatcttctctttatctcaagagcagtgggaagccattaaatgattttaatcagagggttggtataactagttttgtattttgaaaagctgaattcagctctcgtttgagaaactgagtgaaagagcccagaacggccgtggctgagggtgactcgtgggagactcctacacaagccatggcagtggcatgggctggtggcagaagagggaatagggagaagatttggaactcaatcttcctccattgacaaagtcactccagctttggcaaggcaattaattggtgggaaagaagatgcctagccctcctgatttcactgcactttctgcatcttcaacatgagtactgggaagtggcaaaacatccagaggcagcttgggtgctaggtggagcatgagttaaaattccaggatgaagcaaatgaacacttagaatgacaggaaagatttgggagttgggtttgggggagggctatttacctttattccctggagaccctggcacaaacccttgcctctgcaatcttcctctcaggtaaaggaattcattaaatgaattgctagaagatctactgaccagagggctgtacagaatcatatctttgagagtgggaagtaggttgatcacatagtttattatccaatcaggacatatctgaaagagaaagggggttctattaatatttaaactacaaaacatgtacaccaggaatgtcttgggcaaatctggttgccctagcaagaaaggaaatttgaaagtttatactgttctgctcccatgttaccccgtttgcacatgagagggtaagtattctctttcttcacctgcattaagggaataaaagcacaagcattcaggtgactcccaacccacttttaattttacagtttctgctatactctatacattctgaaaattacatttcccaccactatcacttcgtgataggtgatcatttacaattactcactgactcagtcccgggaagaggcggtgcaaaatgggacgctctatccaggtgctcattagaaatgcagaatctctgcctgcctcctagacctactgaattagaatctgcatttttaaataagatttccaggtgatcaatatgtacattaaaacttgagaaaaacctctagacttcgacctaaagaaaaacattttacaacttgacagtgtatgcacatacatacatgcatatagacacaactgaagcacaaatttaatgaagtagaatttaccgttactattttatttgggaaagaaatgtgctcgcgactcaatagattggagtattcactcctggatctcaacttgcaatttgaaaacgcatctctaaagcacctaggagcaatctgaagaaagctgaggggaggcggcagatgttctgatctactagggaaaacgtggacgttttctgttgttactttgtgaactgtgtgcacttagtcattcttgagtaaatacttggagcgaggaactcctgagtggtgtgggagggcggtgaggggcagctgaaagtcggccaaagctctcggaggggctggtctaggaaacatgattggcagctacgagagagctaggggctggacgtcgaggagagggagaaggctctcgggcggagagaggtcctgcccagctgttggcgaggagtttcctgtttcccccgcagcgctgagttgaagttgagtgagtcactcgcgcgcacggagcgacgacacccccgcgcgtgcacccgctcgggacaggagccggactcctgtgcagcttccctcggccgccgggggcctccccgcgcctcgccggcctccaggccccctcctggctggcgagcgggcgccacatctggcccgcacatctgcgctgccggcccggcgcggggtccggagagggcgcggcgcggaggcgcagccaggggtccgggaaggcgccgtccgctgcgctgggggctcggtctatgacgagcagcggggtctgccatgggtcgggggctgctcaggggcctgtggccgctgcacatcgtcctgtggacgcgtatcgccagcacgatcccaccgcacgttcagaagtcgggtgagtggtccccagcccgggctcggcggggcgccgggggtcttcctggggtccccgcctctccgctgcgcttgacagtcgggcccggcaacccggcccccgggcggaaacgaggaaagtttcccccgcgacactcacgcagcccgactcccgtagctgcagggattgtgagtttttcttgaaaaagagaaggaaagttcagttgcaaggggcgcggggcacgtttggtcccctttgtgcgagcaggaaaggcgttgtgttggccgcgttcgaggcgagcccccacccccggaaagggaagtttgagaagttggttatctgaaggcggccggggagcagcggcccggagcggcagcctgagctgccaaagcagccagcgcacctgggccactccgcccatggcgatgccgcgtgcccacccagctctttttgagccacccgttcaaaaggccagctcctcagtccttagctcctggagacggccacgctttccctcaggccggcttcttggcccggagtttttggaaacaagtttcaagaaaataatcgatttccaaaagaaagttagctggctccactgacgccttggcatggatggatagggagtggagatgctcaggtgaaaccgagaatccctcactgaatgcctactgggtgctagaggctgtagattttgcctggaacaagatagtcctgtcttcagggagttgatggttctatgcaattatcgtttgttggaaaccgaagggttaaaatcctaactaggctacccacctgatcgctgtctctgaaggtttttaaggaaaaaataaaaataaaaaaatatatatatatattatatatatataaatatatatataattatatatataaatatatataatattaatatatatatgcatgcaggaatgggggttcttaactatttgttatggaaagtgtaaaacctctgagacttcaaaagttagattttttttttttggagacggagtctcgctct

SEQ ID NO: 58 - DNA, 3077 bp, Homo Sapiens
ttatatcgtgtatgtaatgtataagtatttatttcgtttgcttggggttttgtttgcttttgctgagtccgacccctctacctgccgcctggcccttgcctcacgctccagtgccactgagatcaaggagagaacgaatttgccgctgactgggcagagcgagcgcgtggatcgcggccaccgcccgttcatcacccgcgcgcatctgggctggcaccgggcgaagaatcgtgcgggtctgggacctgggggcccagagggagcgagctcctgcgcgggcgctcggtccgcaggtttcgcaggctcaggggcgtgcctcgttctcacccccactccggaccccggtcctcttccctagacagcggccccctccacccctggctcccgcaggccgctagtagtccgcgccaggccccgccggcgcctctagggccccccagatcgcgcagaccctgacatccccgcctggccctgggttctgggagctgagagccggccagggtcctgctcgtacctccgggcgcccagcctcgggtctgctccccgcggacgccccaacctccccggccgaatggatggtggtgcgcgcgcgtcctactccggcggtgccggccttttctgttgccaaaactagacccaaacctctgcatgggattcgtctttgggtccccaccccgtgcgcccagcaaacagtgggtgagccatgaagatgtgcgagtcagccggaccctccccgtcaggcgcggacccgctgcggccagagaacccagtctgcgccagcccggctcgctcgcgaagccacgggcttcactgacgcgactttccaagacgtgggggtcaccatgggcagaggacatcggttcggagccagatcacgggccccataagcatcagaccataagcagcgccgccactgagagccgctcggaactcgcccagcatgtcgggtcccctagccagggcctggtgtacgtggtcgagggccctggaagccccgatggcctaggaggagcaggcgggcggggcggcgggtgtcgctggccggtagagagcttcggcctgacctagcgcaggtctggtgcgcgcagagaacaactccaagcgcaccgacgcccgcgagctccttccaaacaccgaacgggatccagagcccgagcccacaggcggcggccgggggagggagcagggtgctggccgccgcccgggagtgttcgcgtcctgggtgacccctggaaggacgtggggcccaaactccggctggggttgggagagcagcccccagaggctctccgcgggatcctctgccgggcgggaccgtggctccacaggagaagtgggtggcaagccctgcttggcggaaagcagccgttcccctcctcctgggcctggggcggcgcccctcacccctgttccccgcccctcacccctgttccccgccggccacatcccctgccccttggattccaagcgccccgcgcgccgaggagcccagcgctagtggcggcggccaggagagacccgggtgtcaggaaagatgggccgtctgggggacagcagggagtccgggggaaacgcaggcgtcgggcacagagtcggcaccggcgtccccagctctgccgaagatcgcggtcgggtctggcccgcgggaggggccctggcgccggacctgcttcggccctgcgtgggcggcctcgccgggctctgcaggagcgacgcgcgccaaaaggcggcgggaaggaggcggggcagagcgcgcccgggaccccgacttggacgcggccagctggagaggcggagcgccgggaggagaccttggccccgccgcgactcggtggcccgcgctgccttcccgcgcgccgggctaaaaaggcgctaacgcccgcggccgcctactccccgcggcgcctcccctccccgcgcccatataacccgcctaggggccgggcagcccgccctgcctccccgcccgcgcacccgcccggaggctcgcgcgcccgcgaaggggacgcagcgaaaccggggcccgcgccaggccagccgggacggacgccgatgcccggggctgcgacggctgcaggtaggaggcccagggccggggggcggttcggctccgcgggcgggggctggagcgcagcgctgggcaggcacctgggctcgcagctccgaagctgggaggtgaggggagagcgatcggggacgagctgggacaaggcgacacaggggctccctcggagttggatcggcccctgggacttggcgctcgcgagaggctggagcggccagagtctagcctgcgaggagacgcgggtcctgccctcagcgccggccgcctttggcgccaaagacagccccgcaggggttccgggagggccctcctcctgctgtcccctctccaccccgggctccgagggccgttgggagggtaaccccgggaagaggccggggtgcggggcgcgggtgcaggtggaaatcgccagcaagctcctccccgcccgcgcgctccctccgacctgcagggctgtgccaatcccgaggcctcagcttccctgaggagccagggccaggcccccctctggacagggagaaggatctgggcgggggccttgacccatggagttggttactaagcggtttcgatggtttcccgagggacagctccctgtggctctgagtttgtctgtcgagggctcctggcctgtctccggagcggtcccaggtagagaaagcccgtgaagaaatggcccgggccggcctggagggagacacctcacgcccccttagctcctgggccgcctcctcctgcagcccctgcctttcccggggcttggacttggggagcgatgattacctttgctcagcttgtattttggcctggacgctaggagataagcccatgtagtatgcacacgtctgctacataaacaggggacagatagacgatcttcaaccagcaagggtgcagggaaaagcaatgcaccccaaacttctgaccagaggtcatttgcttccaaagatgctgccatctgtttattcactgtctggacatttggaaatggctcaggctcattaacacaatg

SEQ ID NO: 59 - DNA, 8913 bp, Homo Sapiens
gagtcctagttaagaaaaacgacttccaagtagaaataataggcggggagaaggaagggagatacagggatctggggggttcttagggcaactggcagtgaattttgtctcgagagtcctttctccactcaaaaaaccaaacgcgcgagccccgcgaaaggtttagggatagatcgtgtgggagaggactgagcagagagcgtgggggcagtgtcttgtagaatctttcttttcttaataataattttaaaagcttctgagtggagacgacgcaaagtcaagcagcaaaggtggcctgggaggcaagcggagggctcaagtgccgcatctttaccctcagggtctcctgcgcctacgggatgcgcattcccaagaagtgcgcccttcgagtaagtcctgggcccgcacacacttcgggtccgcagccagaatttaatggcgacaacgtttatgcaatgcaagctaaaaaccaaagcgtaaaaaattactatgtcatttattgaaacgccattctttgtcaaactgcaactactttgcttcacataagtttggctggaaagcttgcagccccagcccgggccagccaggtacaggaggccggactgcaaccggttgcttccctcccgtcgcgcctggccgtcccacgctgcgccgtcgctgctgcctcctggcgcccctgggattttatacgcacctctgaaacacgctccgctccggcccccggttcttctccttgcctaggggttgtttcccaatagatactgactcctttagaagatccaaaaaccaaaccaaaacaccccctacccgccccaaacacctgctctggggcgcgggggctgccaaacagagactagacgaagggagtcagatttagcgaagctcttcgagctcccaaagattcgaacactaactcgcgcccgtgggccgatggaggttctccctactccactccttggtccccttaactggcttccgcctcctggtcaatcactgagcaaccagaatggtatcctcgaccagggccacaggcagtgctcggcggagtggctccaggagttacccgctccctgccgggcttcgtatccaaaccctccccttcacccctcctccccaaactgggcgccaggatgctccggccggaatatacgcaggctttgggcgtttgcccaagggttttcttccctcctaaactagccgctgttttcccggcttaaccgtagaagaattagatattcctcactggaaagggaaactaagtgctgctgactccaattttaggtaggcggcaaccgccttccgcctggcgcaaacctcaccaagtaaacaactactagccgatcgaaatacgcccggcttataactggtgcaactcccggccacccaactgagggacgttcgctttcagtcccgacctctggaacccacaaagggccacctctttccccagtgaccccaagatcatggccactcccctacccgacagttctagaagcaagagccagactcaagggtgcaaagcaagggtatacgcttctttgaagcttgactgagttctttctgcgctttcctgaagttcccgccctcttggagcctacctgcccctccctccaaaccactcttttagattaacaaccccatctctactcccaccgcattcgaccctgcccggactcactgcttacctgaacggactctccagtgagacgaggctcccacactggcgaaggccaagaaggggaggtggggggagggttgtgccacaccggccagctgagagcgcgtgttgggttgaagaggagggtgtctccgagagggacgctccctcggacccgccctcaccccagctgcgagggcgcccccaaggagcagcgcgcgctgcctggccgggcttgggctgctgagtgaatggagcggccgagcctcctggctcctcctcttccccgcgccgccggcccctcttatttgagctttgggaagctgagggcagccaggcagctggggtaaggagttcaaggcagcgcccacacccgggggctctccgcaacccgaccgcctgtccgctcccccacttcccgccctccctcccacctactcattcacccacccacccacccagagccgggacggcagcccaggcgcccgggccccgccgtctcctcgccgcgatcctggacttcctcttgctgcaggacccggcttccacgtgtgtcccggagccggcgtctcagcacacgctccgctccgggcctgggtgcctacagcagccagagcagcagggagtccgggacccgggcggcatctgggccaagttaggcgccgccgaggccagcgctgaacgtctccagggccggaggagccgcggggcgtccgggtctgagccgcagcaaatgggctccgacgtgcgggacctgaacgcgctgctgcccgccgtcccctccctgggtggcggcggcggctgtgccctgcctgtgagcggcgcggcgcagtgggcgccggtgctggactttgcgcccccgggcgcttcggcttacgggtcgttgggcggccccgcgccgccaccggctccgccgccacccccgccgccgccgcctcactccttcatcaaacaggagccgagctggggcggcgcggagccgcacgaggagcagtgcctgagcgccttcactgtccacttttccggccagttcactggcacagccggagcctgtcgctacgggcccttcggtcctcctccgcccagccaggcgtcatccggccaggccaggatgtttcctaacgcgccctacctgcccagctgcctcgagagccagcccgctattcgcaatcagggtaagtaggccggggagcgccccctacgcgcggggcagtggcgccagggactctccgctctaggacacccccctctcctaccccttttgaccgcagctcttacccagctgcttcccaagggccgtgaggatagcggaagcggcggctggggaggaggccggagagtgggagtgcacgcaggcactggcccccgacatcctccaaagccaggcagagctaggagcctgactgttcgcaagagccgggagggcgtctggggccccttagagtccgagagattccgggactgctagtccccacgggagtggaaccaggagaccggcgcagtgtctggctctgccttggggagagttttgttaattaaggaaacgccaaattgtcaccaagcgtagcgcttttcagacgtctggactctggattcggagtgggaccagcgcgggggtgagcgcctgtgctgtgctgcctccgcagcgctaaaatgtccaggagcacctccagcccttataatacggtgttggcacacacttaggtgcacattaagtatcgtagagaactagaatgagcacatgcacctccagtaactaaatggctttctggaacagcgtcgtgtccgtggatagctcccgcgtatggtaatacagaagtggatcttcactgggcttcgctcaggcggcggccacgcaggttctggggatggaagagaacttgacttatccgagtccaagctatgcgggaccaggttctaccgcaggcagtggaaggaggcacgagctttggcctttctttcagcgcatctggggcgcctcttcatcttgtaaacgcggggctcagctgggacagtatttcttcaagacctggggttagaacaaggacagggttattcgctgtgcttagtcaggatacaaggagggaactcggcacacgataagtatcaggttggtttctcatcccgcgccgatgcccgcccacctctctttcgcctgggcggcgcggacccgaacctgcggagcccctgtagtttgccctcttcatttattttcagtggatttccacgctattgagaacctaagccagttcggtttgattcggtaatttagtaaacgctttactaatacaatggcggatgcttttcctggagcaaaattactcgagggcctagggaccgggatgtttttggaatgcgtgggaagcagagtgtatcttttgcaggaggtaccttcgcccaaggctcgggagaagggctctgcccttgttgcccgccttcacccgcgccttctaaacgcgcgtcttcaggccgctcctaccttagcctaaccaggagcacccggcccccgcgaagccttggagaaatcgaaaccgcccttttcttcgggagaatctgggatcactgtcctgtggaggaaccgcaagcagacccaagggttgcctccactctatgcttttagttagtgaaattagtgttttgtactcaaggggcgttgggacaacttactggtcgctgaggcttgtgttctttgatcagatcgcgccacctttgtttagcaggctggtgttacttttggggagtttctaggtctcagtgtccccgtctataagaggacagctgagatgggcaacctggagattgggtccggcttgaagttatactccatagatgcagaagcgctacccaccaccctcttggggctttaaatatggaactcggcaacccatctaaacatctgtgactgagaaacaatgaatccgagagcactgtctgcatgtgtgctatttggaggcggttgagaaaccatcgaatccatgcccctggggcacaaaatactactacgccattatctttttagtacttctaggggatttttgaaacctgggttctgtcgcttcgtttgggtcccttgtccagcccttttcagggcaggtctggtgcctgggatcttatcacatgtcgtggggggtgggactgtgggttttgcagccagcaggcattacacttctggaaaatatctggattcttctgtaatatacaggcgtggctgccatggagaaaaagttaaaaggggaccaggactagtaggtgaatgtatccttcttctccaccctggagaaaaagcccaatggagagagggccctagattcaagtcatatagcctggaagcaccatctccaggtttaagttttgtcttgcagtgaaaacagatgggtccatcttacccagcccttgaggctcattgggcagcttggatgtgagaagcgctccggctgctatcctggagtgggcaagggtggccctcgagattctgggtttattctttggatttccagggttcctgctgcttccccaggaatgcagggcctggcccaagacttgggctgtgagaggcaagggcatcaactctcaaaaatgtggaaatggccatcagagcgccaaggccaaaccccaggggagaggaatcaaggccgtctctggatccctagggcagtctagccatggtgcacaggcaggggcaattgttggtacccactcacaaccgcccaaaacttcacaagcatgttcatattttaaattcttaaatattatatcttgcatcctaatcttgtaaacattaatttagcaaacatcaatcgcctacttggtcaggcactgggttctgaatattaattaagacaatggcctcgagaacctttgcaagaagctcaccagctaatcctggagaggccccttgttttggatgaggaaatccaggttctatgagattaggtggcagaggtgggatttgaacccagaccatgctagggtgtttctactccttttccagggatcttggccccaccgttgagatggatttcttctggcctgcgggaggggcaccaaactcttagtccatgtgtgggggttgacgggtttgtgagggcagatgtggggtgaggacttgagtagccccagactagatgcaaggcttaaggaggaggggaaaaaagcttgcttgggccggacgcggtggctcgaggcggttggatcacctgaggtcaggagtttgagaccagcctggccaacacggtgaaaccctgtctctactgaaaatacaaaaaaaaaaattggccgggcttggtgacgggcgcctataatcccagctactcgggaggctgaggcacaagaatcgtttgaacccgggaggctgaggttgaagtgagctgagatcgcgccactgcactgcagcctgggcgacagagcgaaactccgtctcggaaaaaaaaaaaaaaaaaagaggttgcctgctagtccactgatcccgcagccccgcaggctcgcagaaccctaaggcatgattaggcctgggatcatcaggccaccctagggtcaggtgcggaggcctgcgacgcccgagggccaaaggctccctcttccggtcacacaggagagggtattttgttgggggacaggttttccccaatcacagtgcagctgcagtcatcgttttcagccttctgagcaccttcctggctgagcctgctgtccatttcacccctcagctctcacggcccggccaggccaggcggttcccggcttctctgcagccgccggcgggggaggagggcacagagcgcgtctcgcctcttagcgcacggtcaaggttgcgctcccctcccgggccgggactaaccgtgggaaaggcgctaccttggccactcgattctctccctccaaggcctgtacaaggagcctttgaacacgctgctccttccagccggcagctttacctcccctggcccctgcccccgcactctccgcgccaggccaagcgctgggcccagggacagcgcgctctaatcaaacccgtgtccgataagcttctaattaaaagagacctccctccgctccgcaggcgctttcaccactgcccctcccggggggacctgaaggagagggtttgaggccggtctttgcccgccgaggtctgcgtgtccggtctgggaggaggcctaggagggctcgcgggccacgggcatccttgggcccgagttctggggtgcggacggacgtctcgagagtgggtgccgcgactcgggacccacggccctcgccgggcacggacagttgcggagcagggctctgaggattgtgcagtgccctgggtccctgcctactcctgggctcaggaatggagaagggttcgtctagagaaaacttcttcgtagcttctatttcgtctctctctctctctctctctctctctctctctctccctccctctctctctctctctctgtgtctgtctctctttctctctctctctttttagtgtcctttcagaaattcggccttcactccgggcaatagtgggtgccctgagccaaatttcgtttgtaagctcatctataggcctcaaagaaggccaggcctcaggtttcaaaaggaagtctgtggaagcccaaacgtgctcgcccatgcaggagagctaacggggccgggggttatctttgcccacttagcaggagagaaatggaggccctcgaggtcatatgataaaagctagtggcttctcaaatccccagtgtgtggtgctgagcagtgtgtgagacttaagcctggacctgtactatccgggagttaggatttgccccctccttccctcccttgcactctgccacaccaccctccaggctcatgcctctgttgccccagagaagctttttttttttctttttctttttttttttttctgggcggggggtggtggtgtgtgtgcatgagcgtccgtgtgtgtttcgaaaatggaggtaacgatgccctgggtcctgctcatcggctgagtcctgcttaagtctttggaggcactttggtcaaatagtgcaagagtgggagaatgggtgctgtttgacccaatttactcctgagaattttgtgaagtttggagacccagggcagtcctgggccaggaggatctgaggctgctggggtggccctgccaggatcccataggagcagctctccttagccattgtgtctggacttcaggccacagactccggaacttgtagaggaatgagaccccatccttgggttccggggccaatgacgtatctttagccgaaggatccttttccccagaggcagcaacagctttccagaagcttgtggggtataagtttaaagcaatttaataacaaaaattataaaagactatgttttccaactgaggctccacgctctttttctcactttgggggggggggggaatgctaggatttccctagggggaaactgaggcaaaggaccgaagcactaccatggagggaaagggagatacagtgtcaggcacactctaaaggaaattggttgtccagcctggggagtgaggaagttggctcctacagcagtggtcagggtcggacccctgggcgcaaggtgggtcccataggggggaggaggaggagagcgcagggtcgccatctgaaggcccaactggaaggggcccttgttttccccctcaccagctttcccttgggtgtcatggtgtcaggtcgggtagccccagacagataacattactcggtaattactcttcccatttttaagaccaggccatttaactggctccgagtaattaatgaaagttggtgcgcgggcccctgatttacagctcggagtcaacgcggggttagcccagcagattcatttcgcttgcccgcgctgctcctgcggaagagctgcagtttatttttggggggtgaacaaccttctctgtcgatcaggcaacgagttttatacttaatttgccaggggttcgctgcagaagcggcagagaccgtagaagactgcggcataaataaattgggaaaaagcgaggtgggggttttagtcagaaaaggatggagaagcctgtcccaaggtcacatccagggacttgggccgtcttcctgccgaaagtcctggaggcttgtggggctggattctcctccgctgggggtccgaatgcggggttcagcgcacaccccccccgcccgtggctggttcagacccactgccccgtcttgcgagagcaccgctgacactgtgcttctctccgccgctcccgcagg

SEQ ID NO: 60 - DNA, 2501 bp, Homo Sapiens
gtaaaaggcttttgcaaagatgaaggcttttacatttgtgagggaaataacaataataaaggtgcttggaagggctgctcatccgcattcatgggcctcttcctagaactctgggaatctttctccctagagctctgtaggcgtccagggtcagggctggaaaggccttcacaaatgctaatctgtgagcattttatgggttgccccctgaccctcagcatcctcctccttaactagatccaatggtgaggtgaagaggtgggggcgatggagaatggcatttccagtttggagaaaaaagtagggagaggcggggaagccttcccaccccaatcccagggccaggttcccctctctccaaacaagcctaaggaatgtttttcaaggcaaaatcccacctcactgtgtatttggttgtgaagggggctgtccaggagatcagggttgtttttggagagtttggagggcaggggcaataatgtctgaccccctgcaaacaaatacacctgtaagaaaagctagaccagagtgaagtaaagccaggatttgatggtggcgggaagggaaggggccaatgctgctgctggacagaggggtgttattttccccagaagaatagcatgtcgtggtcatcatcataataatagctgacacaactattatgggctggggacttataagagctttcataactctcaggtaggaggcactacgaactccatttcacaattgaggaaactgaggcacaaagaaacgaagtagtgacagcagctttcctttttcccttcaacagtttggaatcaagctgtttgagccgaggctgggtctcaggaggtgtggacagcacttccatctcggtaaatcagattcgcctgcccataactggggagaatggtggctttgaaaaggttaacttgggagccctggggacggctgcagggaacgtacgcccattccccctaggaagcagagccaggccgcctcctcctccgcagtggtgaggacgcgtggacagtcccgcgggggcggcgggagacctgcggagtggccgcactccaggtccgcgccaaggccgggcagctccgctttctgctcagtctccgcgaggtgtcgccttcggccgaagaaaccaccgcggcgccaccctcgtagctcgcacttatttatttatttattttcaaacaaggggggcgcccctcttctttcaatttgaaactggaaacatccagaggtcttgttcctaagggggcgcgtcctctccctgctattttgcaccttcggactagccttctttcgtaattacacaggagcaacctccctgcaaggccttgctcaacgttggcctcgcgctcagctgcacaacacgcagtcaaagcgggggctgggttagaagcatcggtctcccctccccaacacacacccccggagccctccgtaatttttttttcttttaatgacaagcaattgccaggctcgcagggtgggtgctgcattgcaccgctccgcgcgcagctggttctcagagtgcagccggtgcaagcccgggggtccaaaagggcgggaggagcacaccctgggcttcccagctttgcagccttctctctgcaaagaaaagcaagtggcttttggcgcgaaagccttggcgcctcccctgatttttatggaaatcaggagggcggggtaaagccgctttcctctcctttctccctcccccttgtctgcgccacagcccccttctctccccgccccccgggtgtgtcagatttttcagttaataatatcccccgagcttcaaagcgcaggctgtgacagtcatctgtctggacgcgctgggtggatgcggggggctcctgggaactgtgttggagccgagcaagcgctagccaggcgcaagcgcgcacagactgtagccatccgaggacacccccgcccccccggcccacccggagacacccgcgcagaatcgcctccggatcccctgcagtcggcgggaggtaaggagcagggcttgcaaaccgcccggcgcccagggaagcgacgagcgccggggcaaggcaagccctggacgggattgcgacgtgcgcaccgggcgccctaatatgcccgggggactgtttctgcttccgaaacaaaaccatctctgggttttcccagaaaagccagttccagccccgaaggcatcctggctagaggagacccgccctaatccttttgcagcccttaccggggggagtaatggcttctgcgaaaagaaattccctcggctctagaagatctgtctgtgtttgagctgtcggagagccggtgcgtccccaccccaggctggggttcttctccaaagggtgcccctggaggaagaagagggggggattaggcagggcgaggccgccgcggtcgcaatctgggtcacggctgctccagcttggaggagaggcggctctcccggcgaccctcctcgcgcgggcgcccctgccattcccgggaacaggggctcagcctct

SEQ ID NO: 61 - DNA, 2501 bp, Homo Sapiens
tggagtgcaatggcgcaatctcggctcactgtgagctccgcctcccgggttcacgccattctcctgcctcagcctcctgagtagctgggactacaggtgcccaccacgacacccggctaattttcttgtatttttagtagagatggggtttcaccgtgttagccaggatggtctcgatctcctgaccttgtgatctgcccgcctcagcctcccaaagtgctgggattacaggcgtgagccactgtgccctgcctaaggttggtttttgttatttgtaaccaataacccagactagtacagcaaccatctcagacatctgtggaccagagaaaagtcactaaaggacaatccaatgcctgtgccttggggctgcaaccaaacctggaacccttctgatttgtgtcttccgtttagcacaaagcagggcacacaagctgtctcagtgaaatctggttagctgagtccctcagtaagtcagttagttcacaaatgtctgccagaagctgttctaggtgcagaaatcacaaagcaagtaggagcaggtttctgccttcaagatgtcccacatgcagcacagacccaacgtatctaaaacggaaggctgtcattttccctgccttcccaacccatataacaacacacatccgtgtcccatgctccaaccacactgaattgcttgcccttctcacttccgtctgccaacagtgagtagtttggtgttcttagaccacaggggtgggagggaaagagagagacagcagacaatcaggctggggtagacagacaccagaccttgatgccaggtggaggaatctagatgtattggctgctgtcccaagttactctcctctggcctaaatctcagactggccgtatagtttaattttttctcttccaccaaaggtcatctgtgtagaagatgacacaaagggggacccagcacggtgacccgtgcctgtaatccctgcactttcggaggctaaggagggaggatcatttgagcccaggagttcgaggctgcagcgagtcatgatcgagccactgcactccagccttgacgctgagtgagaccctgtctcttaacaaaatatatttaaaatttaaaaagaagattatacaaaggggttatctatcatcttggccagcaatgcagggcaaaacttgaaacaacttggtcctgcagtattttccagatgccaaatcctcattctctactgtacagctcctacagtgttttgtgtgagatgagagggagcatggcgggtctcagctggctttgccctgggaaaaattcctcatttctgcaccgcctccccaaagcgggggctaagccagcgccgtctgcctctccacctagaccagaccccttccctagatgctcttatttccctgaagcctcacaacaaccctgtgaggtaagcattaccatcccttcattttacagatgaaactgaagctcaggaaggttacgtttcgggctctaaatcccggaatcttcgcttcgatgccatccaggcttgggccactgagctcaagaaacgggccgacgggtgaccagacggacgccgggaccagcccaagttcagggctgagggccgccaggtggcgcgtttccctccccctacccctcgcggcggctcgggcgcacctgaacccagcggggtgcgccggggaaagtaggcgcgcagggtggggcggggagtagccctaattccccagctcggagtgggcaaggagcacggtttagctcagccggctggcaccgccaagcggccgccgggccgcatcagccctcctcctgtttgcgctccccagcgtgcaatttatttggggggctaccggggattgaacggagcgggcgagcgctgccaggaggtggggccggccccacctgtcgactgcccgtagtaggcagggagagggcggggtttgtcccatagggcccgccccccagtccctgggtcccgggcgcgcgacgagatataaggcagtcaggaaacaatgcgcctgcagctcgcgctcccgcgccgatcccgagagcgtccgggccgccgtgcgcgagcgagggagggcgcgcgcgcggggggggcgcgcttgtgagtgcgggccgcgctctcggcggcgcgcatgtgcgtgtgtgctggctgccgggctgccccgagccggcggggagccggtccgctccaggtggcgggcggctggagcgaggtgaggctgcgggtggccagggcacgggcgcgggtcccgcggtgcgggctggctgcaggctgccttctgggcacggcgcgcccccgcccggccccgccgggccctgggagctgcgctccgggcggcgctggcaaagtttgctttgaactcgctgcccacagtcgggtccgcgcgctgcgattggcttcccctaccactctgacccggggcccggcttcccgggacgcgaggactgggcgcaggctgcaagctggtggggttggggaggaacgagagcccggcagccgactgtg

SEQ ID NO: 62 - DNA, 2501 bp, Homo Sapiens
gccaaggtgggtggatcgcttgaggtcaggagttcgagaccagcctggccaacatggtgaaaccctgtctctactaaaaatacaaaaattaggcacgtgtgatggtgtatgcctgtaatcccagctactcgggaggctgaggcaggagaatcgcttgaatccgggaggtgaaggttgcagtgagctgaaatcctgttactgcatcgcagcctgggcgacaagagcaaaactccatctgaaaaaaaaaaaaaggaaagaaagaaggaaagagaaggaaagaaagaaggaaagagaaaggaaggaaagaaagaaagaggaaaaaaggaaaggaaaaggaaaaagaaaagaaagaaaaggaaggaaagggagaaatgggatgcctgtcaggtgcagcgctctggggaggcgtggagagcctataatagggaccaaggtgctttttagtcgcagaacatggattatttgttaggtgtggctttggcacatctaggtcattggttctgccgacttgctaaacccaaccatctgggcattttctcggctaatatagaggatgttttcatgtgaacacgtgtccacctgtgaaatgtttataatgttaaaggttcgttctggggcaaacatctgatagcgcctggcaaacccaacaaatgccttttctgtaatgagtaagcctcctaatgcccaaagaaacagttgaattcgttagcaacatgtcggatgttttccctatgtctgtatatttcttcgctagtttttttttttttttctttttgagacggagtttcgctcttgttgcccaggctagagtgcaatggtgccatctcgcctcaccgcaacctctacctcccgggttcaagcgagtctcctgcctcaacgtcctgagtagctgggattacaggcatgtgccaccacgcttggctaattttgtatttttagtagagacggggtttctccatgttggtcaggctggtctcgaactcccgacctcaggtgatccgcccgtctcggcctcccaaagtgctgggattaccggcgtgagccaccgcgcccggcccgctagttctaatatttatgctttttggagggtgaagggcttgaaaggcatcaaaaaccttggtttctaggagcgagccaaattttctcccttagagactgaaggaggttatccgactccgcttccaggaaaatccaatccgcaatttttccctcgctttggctcttccaggtctcactactcgcgccggggagacgcggtccggcctacgctaggccggcaagaatctaccaggtcccaggagggcggggccgagccccagaagtcggggcccgggccaggagtcttggtgcaggcggactcgggcgcgtgccatgggaccacaactcccggcacgcaccgcggactgcgccgaacacggttggctgggagatccaaccctactgctcccaccggccaatgggacggaggaaagaggcctgacccggattctcggaggccaatggcaatacagaggaggcgggtgcttccttaccactcaccttgcgctcagagaagccacatttaaaaggtcgtgccgggccgggctttcgcaggcagtgggaccagagccgggaggggcggcggtgtcccgggaaagcggctcttggggcatccgggtcccctcgaggcgggctccggacgtcgccgtgggcggggccgagggcggggcctggcctcgttgtggagcggctcgtaatccatcatggcggccgcggggtttggtgtctgtgcctgagcagcgctggagccggagccggttcccgggtcctgcggctgaggagcccctccgctgtccacggcccctaccggcggggggcggctgggtccctcggcggagctcgggagatgtgactgcctgagggcggtggtggtgtcagcgtccggggccgggggagggggtgtctcgggcagagacccccgggcttggggcagctgaggcggccgggcctcctctacacggggcccgccttccgctgtctgggccgcgagagtccttcgtcccttacagccccgccccggctttgggacactgcgggtggtctgtttcccccagcttgggacaccccgttttctgaggcgtggaagagcgtcgccccggagtaagctgcccgtgccgcgccccgacagcttccctcagccccaagccgccccttattccggatcccggccccaactttggccacggagcctcccattcaaatccctcccttgctgtcaaggggtctccccttcccccaaggtggctcccgcgagcctctaatgccctgacttcttccaatgtcacctacggcccccttagtctcagctcagccaaaaactttaatgcaaaggaaaagtctggattggttccacaggccttttaaaaagcggacttaaaagttgctggcaatgcattccttttcgtcagagtcgagggcaaactcgctgaaatctgggtgacccgtgtccttttccggagagc

SEQ ID NO: 63 - DNA, 2501 bp, Homo Sapiens
cccttgtgtgtggaacacatcctccatatagccacactactcaaaattcactgtctttaagtctttactcaaatgcttctccgtgaagccatccctgagccctctttaaaattgcagccccccactcctgtactccttattgtctctcatttttaatttttgttattgtagttagaaccatctgacacatagcttttattccattggttttttgttatgtctttctttacaagaatttgaagtccatcaggccgggagttttgtttgttgtgtttgctgctatctcccagtgcctaaaattgcctggcatacagtaggcatttaataatctttgaatcagtgaaaaccagatggtggcttggcatttccacataggaatgagccaggtggaaatcatccaggatataagtagatcttgaagtgataaggaagggtcatcataatcatgtggggcccattttgccctttcttgtttcttttctctaggctcagcaacagcctcaccaaggactccatgaatatcaaagcccatatccacatgttgctagaggtgagagcagctcaccccactaccagactctgtgtttagggtggtgacctgaagaaggaagagagcgaaagaagggaaggaccatctttccctctaaactggagtcaagggagggaggtcagagcaagcctgggggcgtaacccagacccagtctttgttcaatctcttctgtcctctttttcaggggcttagagaactacaaggcctgcagaatttcccagagaagcctcaccattgacttcttccccccatcctcagacattaaagagcctgaatgcctttgagtcacatggcccttctttttccccataaaccctgctagttgccacgggggcctgttcctagggcacaaagttactgagagacccagagatccagtctctctgtggaacctccaaaatgccccagcagtcctgcctccagcctgttgcctggcagtatttgccagttgaccttatgcactgccctctcttctgtcatcttggcaacctgggccccccacctcaccctttcttccattccttttcctagacgccaccctttgaattgccatagagaatgggccaattcatggtggaggtttgttcattcccacaacaatcaaagggccctaaggtttacgctttcacacacccaatcattccccaggtaccccaaattacacccaaaccctaactcagccctaccttgtcttagcccctgcttgtaagtgttccagcttccaatgggcacagacctggatcccgctctccctagtcgggcccctattctaggttgagtccagccaccgccaatcaatgcagagccaggttcctcccctttttaactctggccgcagttcaaccctgccctctgaaagcatttcgtttctgccactcaatgctctttcgtgtgcctgacagccatcctgccctcctacctccgctgtgttctaaattcgtctttacccagctctatggtcttgtctaaccgtagagctgccctgcccgcctacgcggagcccagtccgacccactcccgccggctgctacgcccatttctatacaagccctgcttccgctgagcagcatggcgtgcgacaccgcccccttggtgttttggcaggggtctagaagtccctcgtccgccaatcagagaaaaacagggccacccacccccgtccttgggggctgtcttccatcaatcccatgtaagccaatcagtgtgaggcagacccccgcccccccgacacaggccccgagccttttcagttgctcacagtccgtcagtccttgagccaatcggcgtggagcaccgtgaaggccgaacgcgcctcctcgggactccaggggccgtgagcgttccatcatttccccttacgccaatcacggcacagctctgtagggaagggcccgtcccccaacccctcgaggccttgcggccgattaatagcgctttggccaatcagcgagcggcgggacattgggctcctcctcctcgggcccacgtgagctgtagggaaacgcaggggcggcttctaggtgctgccgccgccaccgccaccaccacctccaccgccgcctcggaacccaggcctggggggcggtggggccgcgtatggagcccccgccccccggagctgccaacattgccaacgccaccgccacgctacacacaggtgagctctgggcctggagggtggagggcccagtccgtgaccccacgtatccttcccgcccccgcgcagaggatgtggcttggccggtggcctgctggtgttcgactccccgccgccaccaccacggctggtggacctgcgtgtggcattgctcaagcccttcgtcccttatagtggatctgaccgtggcctaacctccccctcccgttgtataatggatcggtctgcgtgcttatgtttttccccacgccaacttagggtggactcgtccataggctttccccctaccccta

SEQ ID NO: 64 - DNA, 1176 bp, Homo Sapiens
gagcccgtatgtcttcctgcctttaaggcatcgcagcctcctcgcctggaggccccggggctcgctccgtcggaccccgctccagaacccgcccagcgcgcaggataccgtgtcccggcgcgcaaggccagagaggggcgcaactctggacgtggggccgccaccgagcctgcccttcccggctcccgaaaggccccgggctcagagccaagactgcgcttgcccgaggctgtcgggcccgccctccctcgcgcccccagcgcagctgcccgccgcccgaccggaagcccgcactccgcctcgccccaccccgtccgcgcgccggccgcggcactgcggcggttaccaggacgctgaagcagcgcagccaatagcgccacgctggcggcgtgctcccggcagccagccaatgagacggcaaatcaatcatttgaaacacccaatggacggagcactgcggcgccaggagggggattgtgatagggagataggaggctgcggctgaccaataaagaccaaactggcttaaaaaggcggaccttaggcagcttgattgacgggggcaaggccaatcaaacgagggagcttgccagcctcgttctggcagcccattccgagactagcggaggcgggcagggagggtatataagcgttggcggacggtcggttgtagcactctgcgcgcccgctcttctgctgctgtttgtctacttcctcctcttccccgccgccgccgccgccgccatcatgagggaaatcgtgcacttgcaggccgggcagtgcggcaaccaaatcggcgccaaggtaagttgccggggcgctggggccaggcgggcctagccgggcggtgtgggcgggcggccggggaagatggcggcagcagcggccgggcggcgccccgcattgcggccgccgggccccctccgcggggaattggccgagccgggcgaccgaagcccccaggcaacccgcggccagggcagcgcggggcggggggaggggcggggagggccggctgccgcgcccgtccggggcggggctgcctccctgcgcaccggccgcggtgactcagccccgcccgcccgggcccgcccgcgtcccttgtagttttgggaggtgatcagcgatgagcacggcatcgaccccacgggcacctaccacggggacagcgacctg

SEQ ID NO: 65 - DNA, 792 bp, Homo Sapiens
ctgcagaggaagaagggggctgccggcaaacctgctgactcaggctccacgagggagcaagtaacactggactcctttcggcactccgagaatggggtgggggcgtcttcaaaggatttccctcccttcccagtgcttgtccctgctctcggtccgttttctgctaagatttggggattttcagggcctggagggaaagtcccttgggacgatcatagagcgctagcactgaatcagcctggagagcgcggaaggaaagggtcggtccgcagagggcgcggggaaggcagggtggggacgcggtggagcccgcgctcgtttgctgaaggcttggaagtgcagcgcagaagacagagggtgactaggaagacgcgcgaacggggctggccggccggcgggtgggggaggggaggcgggggaaggcggctgagtgggcctctggagtgtgtgtgtctgtgtcagtgtgtgtgtgtgtgtgtgtatgtgtgtgtctggcgcctggccagggtgatttcccataaaccacatgccccccagtcctctcttaaaaggctgtgccgagggctggccagtgaggctcggcccggggaaagtgaaagtttgcctgggtcctctcggcgccagagccgctctccgcatcccaggacagcggtgcggccctcggccggggcgcccactccgcagcagccagcgagcgagcgagcgagcgagggcggccgacgcgcccggccgggacccagctgcccgtatgaccgcgccgggcgccgccgggcgctgccctcccacggtaag

SEQ ID NO: 66 - DNA, 6325 bp, Homo Sapiens
aagcttttttgggcaaattacacataattagataggctgggttagggctgtctacaagatcccagcctagagtgtggtgcagtagcctattttctctaggactcttgctgcaacaggatatgggagaagggaaacattaacgttagcagaatgggaggaatcagattatggagacatgatccttgccttctggcacctctcccagctgatttagaagaggacacagagggagacagacatatggccatttctataattataaactctgctacatgctgagaggatggcttctcaaagccagttagtgtacaagcagtggaggttgggactgccctacttctcctgcctagggtcacacagtctggcagatctggaaagacttccctgagaaagtgaccttggaactgataccttagtggaaataactaggcattgggagggggtgaggtgaggagaaggtcaagaactttcatgtagagggaactttgtgcagagaccttagtcaggaagaggttttgcatagtggaggaactgaaagctaacagccaggctacagtacagagcaaatgatgctggggtgtgaggtgatgtcaaaaggtagacaccagggctagagggcgcataatcttgcaggccgtgctaatgattttgttttctacccaagaatgctacttcaggagatcagtcaaaaggttagggtgatggtgacggtggaaatatagaaaaaggaatttattcaagaggtattcaaaaagaagtgaaatagagatgagttggagatagattggataaaaagagtgagggagagggaggtgtcaggctgcagcccaggttctgagttgccaaagaggagtcttttcctccaggtgagctaaggcttagaaccacgatttttggtcactttttcttattttcagtgtgagaagtggcgagttggctgtccaggtacacactgtcatcttacacttactgtttaagacagaggcgcatatttggaaagtgaatgagtcaggagccagaggagaaggtatgtcggcagagcctagggcgagaggaggaagagagtctgggggcgcgtccccaaaaaggagacagggaagacagagcagaggccggggaggggagagcaaggaccatgacaggaggaaagagaggctagggaacactgaggtggaggaatcctgggatatgacagttgtaaagaattgtagccaacctaatccagttctctcaatgtgcaactgaggaaattaattttcatgcgtttactttattgtaaatgtggtacttgcacttgagaaattttggaaaacataaagatgtaaagcaaattaagatcactcatagtctttccacctagagacatgtactgctaaagcaaggactttgatccttttttccctttgcatttttaccatggttggaattgtaacacagacacaaccttatgtcctgcttccaaaacataaataatggttgtaaagcgtcccacacgttgacccaaagtctcctttgaaacaggaaattgagacacgccggttgtgaaacctactgaagtgagcggcggcgccaggaattcctgggaccccgacctctttgcagctcgcacagctaagggcgagggcgcccttcggcagaagcagcaaaccgccggcaagcccagcgaggagggctgccggggtctgggcttgggaattggctggcacccagcggaaagggacgtgagctgagcggcgggggagaagagtgcgcaggtcagagggcggccgcagcgggcctccgcgaggtccccacgccgggcgatatggggtgcctgctgtttctgctgctctgggcgctcctccaggcttggggaagcgctgaaggtgggtggaacgagggcgcttgagtgcactcgcgggagggcggagagagggagctgggtagggacggggagggcaacgcctgatggggactggtgagacccgggacgcactggcgcgatctaggtagaaaactcgctgctccctggctccggggagaggcagcgcggcacagagttcgctggcatcagccgcctcctgaagctcatctcctcttgtttctttcttccttctctttatgctggctgctctcccggccacttgctacacgcctccaatcttcattctctcccagtcccgcaaaggcttttccccctccgctgcctccagatctcgtccttcgccaatagcagctggacgcgcaccgacggcttggcgtggctgggggagctgcagacgcacagctggagcaacgactcggacaccgtccgctctctgaagccttggtcccagggcacgttcagcgaccagcagtgggagacgctgcagcatatatttcgggtttatcgaagcagcttcaccagggacgtgaaggaattcgccaaaatgctacgcttatcctgtgagctgagggataggatcctgggccggtacccaaggggagagaatggccacagaaactcaactgggagactgtggcaccacctgatgagattctctgctctgtccaccctcttctgatttcccttctacctggagatgtcccaggctttgactcctcaaatgtccctcgttcctgcctactccaggtcacttactttcctttccctgaagtctgggtccccattataacctgcacatcaatttcttctctttcatctctcccagtcttttaaacccttctttgatctttctccattcctctccacagatcccttggagctccaggtgtccgctggctgtgaggtgcaccctgggaacgcctcaaataacttcttccatgtagcatttcaaggaaaagatatcctgagtttccaaggaacttcttgggagccaacccaagaggccccactttgggtaaacttggccattcaagtgctcaaccaggacaagtggacgagggaaacagtgcagtggctccttaatggcacctgcccccaatttgtcagtggcctccttgagtcagggaagtcggaactgaagaagcaaggtcagcctgccttccttactccctgcattccacttcagggctccaaacgggcttttccattccagggttctcatccctttgagcattcaaagaagaggaaggcccaggaggggctggataaggggtgagggtatttattcatttcacagacatcaactgagcacctcttgggttctatgaattcaattaatgaacaactgggggtgaaaggtgtcaggcagttagttaggatccctgcttggtagggggatgttaattaatgcaatgcttgaaataggctacatatgttacttcaaaacaaagggtgttataggggaacagacaaggggcattcataggaggctgggaccagagaagaagaaggagtatcagggcaggctccctgaagaaggtgggacaaatggattgaaagttgtgggagacttcatttccagaagtgaacatgtcaggggcatacaggaaggagggaaataaagacctgaaagtcaaaaaggatgatatgaggcctggagcctctaatgcagagttttcactttaagatcccccccattcccttgttggatacagtgaagcccaaggcctggctgtcccgtggccccagtcctggccctggccgtctgctgctggtgtgccatgtctcaggattctacccaaagcctgtatgggtgaagtggatgcggggtgagcaggagcagcagggcactcagccaggggacatcctgcccaatgctgacgagacatggtatctccgagcaaccctggatgtggtggctggggaggcagctggcctgtcctgtcgggtgaagcacagcagtctagagggccaggacatcgtcctctactggggtgagaaaaagctgggcccaagctggaaatggcaggaggtggtcctcaggcatagagggaggcactggggtgggatgtggcttgatatacccaggttagaggagtttcagagatgaggcccccagtaaaaggatagagagaggggttccagacacaggaaggagggaaataaagacctgaaagtctaaaaggattgaaatagtgctctctatatacaagaagaaacaagactacaaaactcagggatccagaagtaggcagcgaataaacaatcccaggacgattcattccttggcttaaagggagccaggcctttgggaaggcaggttagcaaagatagcttggttggttgagtgctccctgtgtaggggccaatgaatctgcatataatatctcatctcatcattcacagttttctttgaagcaagtactgctcttttcgttatatagatgaggaaatgaaggcggagataggttaactgcccggagccacatagaaagtggacgggctggatttagattcaggtctgccttgctacaaagctgttgccctttccctctatgctacactagcaaatgccaaagtgggctgaatttgggatgcccaggcactgaaaacaagatggggaatctaaacttatgaggaatagaaattggggttttaagtggaggaggaaataagaagcacctggtaccctcacacatgcctagaccaggggattggatatatgtagagaggggtcctgtgctgagagacagcctatgttcctccagagcaggtgggagctacacctccatgggcttgattgccttggcagtcctggcgtgcttgctgttcctcctcattgtgggctttacctcccggtttaagaggcaaacgtaagttctcccctttccctttcctcaactctctctccccttcattcctggcttcccttttccttaatggtctttccctttctattctctcacagttcctatcagggcgtcctgtgactcgccttgccacatctgtgtctctggaacccaggacctctggacctcaggttcccaagacttcagtcctggtctgctcaggaattgaagatgtaaggaattgaagataggagagataccttgaaaaagtagagaacagtcatgaggcagctttcatcacacccttttaacatttatctaaaagaatttaaattctttttcaaaaattacactacaagtttataagcccaaatggctctgtgaaatcagaagtgcaaaggtgtgcaaacttgtatctgaagacctaccagggacaagcaggtaagagctgatgtgagtgtgtgtgatgggatctgtaaggaactggaacacacatgtcctatccaaaggaatcagctgcagctgcttgttgtcaagtataaagtcaggacctggcttggctttaaccgtttttcaagaaaactggaaatctggattttcagcgaacatgcctgattttaaaaggttgactcaagtttttacaaaatactatgtgggacacctcaaatacatacctactgactgatgacaaacccaggagtttgtgtgtcttttataaaaagtttgccctggatgtcatattggcagttggaggacacagtttctattgtaaatttggatttacgactgaagaaggacattttctctttaaaagaaagttaggttataagaaacagaggcgtctcacatttttacttggtgtaattaataaacgaagataaatcatagtgtatgtgtattatgttgaaaaaaactactctgagtaaggatatttctctcaaatggtcatcactttttttccttggaggaagattgtcatgaaggcatcccttccttcccaaaacgacaacggcaacaacaacagtctcctttacttacagctattaaaagagacaatgtagggaaagggccaacaccacttgggcaagcatgagctgcagcgatgatggtgatggtagcccagccatgctgtgttcttatcttagagaggacagagcaggaaacttacaggggtagcagacctttctgatgccaaagaaataaggaggccaaaatcatgtttgcctagctgggaggtaaatctcttggcagtcagggtccctgaacacccagaaaaaataagtgagacttaactgttggagagtgtttgcttgagaaaagtaacatttcacactctctatactagacttgcacatatgaatttaggatgtgcgtgaagattctgctagcttcaacatatcccaaagcacttggatatgcctataatccaagtgctttgggaggctgagataggaggattgtttaaggccaggcatttgaaatcagcctgggcaacatagtgagaccctgtctctacaaaaaattaaaaaactagccacccatggtggtgagcgcctgtagtcctagctactctggaggctgaggtgggaggatcccttgagcccatgaattc

SEQ ID NO: 67 - DNA, 5942 bp, Homo Sapiens; identical to SEQ ID NO: 24

SEQ ID NO: 68 - DNA, 4370 bp, Homo Sapiens
ggatccctggaaaatggagaagctgtgctaatagaggggggccagaaatccccactctagaatgctgtagaatgttgggagacacccaggatgtgagccagggactttctggaagtgtttgttctggccccacccgaccccaggcagtccccagctgtctgcacagtcggatggggagggggcttgcacagagttggagccagaggagagagctggctcatcccctacggtaggatggggaaacctcacagaccacattgtcacccggcctcagctctccgccccggcgctcagagggtaactctcacccacctcgtccgcttctctgaaccagagtgacccaggctgccgtccgccccgctctcctaccccgagttggcacggaggtatagcgccagaggggggccccaggcgccccgaggtcttgcccttgcggctttccctttgcgggggtgggcgccttcttccgggtaggggccacgtggccctggccgggcggggggctcggcccaccccgcgccgggcccagtgactcaggccgcagctgttaccgcgtcacatgagggaggccggcggccactcggcgggggaggggaccgtggctggagcccggggcggggccgcgcggcaggcggggcgggagccggggggcgcagctagagagccccggagccgcggcgggagaggaacgcgcagccagccttgggaagcccaggtgaggccgcggggacccggcggacttcggcgcgggctgggagagaccacccgcagtcccttcctccagggctcgccccaggcccgcggagactcgtccggcgctctccagccgccctggagcaactttgcttcgaagttccctgggcccgggcagggtgtggcgggggtgctggctgcactttttttttttttggtgggcggggaggtcagagcccaggggaaaggggctggggcgggggtcggggttgggctgaagaccgtttctccaggctgggtgttgggtggggaaagggtgtttgacgcccggagactggcgggccgagggtcggcgtcaggctcaagcccctgccggcgcccttggatctgtcctgggccccagaggcggcggggcggggtccgggcttcgcggccgtcgcccccacccctctcctgcgggtaaagagggggctgggagacgtggatccgaccgcgggtttccgggtgggaggggccgggaatcggggccgtgaagggaagccctcgagggccggccgggagcccggaaaccgaggtcccccttcggccagttttaatccccccgccctcccctctgccccaggcccggcagccatggcggtggaaggaggaatgaaatgtgtgaagttcttgctctacgtcctcctgctggccttttgcgtgagtggcgaggggtcctggggggcgcgccggcagggtgcggggagacctggctccacagtggtgagggctgagggaatgagaattaaggcagctggagaccagatgtggaaagaaagccagggaaagacagcgcagccactccctcctccagttttcctggacacctgaggcttgtttccaccgagaatggccatcctgggtgtgcagcaacccctacccccatccctcctggcccttcctgtctggtgacccaaccacttgtgatatggggcagtggggcaaccagccaaccgcctgatgctatcgccatggggcttcccttcgctctcccttctcccctctctccctccccaaccctctcatccctgtccagcccctctccccctttccctcctcccagcgcttgggggtgaggaagggctctgcccacttcaatttgctcctgccctgggctcctggcttgagaggctactgtttgtatagggagggacacatcactcttgctcccttttcctcttcccttctcctggcctaactggccagaggaaccttagtcacagctgatgcgcgcgtggatgtgcactggaggatagtgagggggcagttctgggcgcgaattgagctgggagccctggaggcctgtagaaagcattattctaggtcagaaatacgtgtcttgaggtcaaggctttctgggaggtttttgaatttggtcatgtccctgattaaagagccgggaggggatcaggggaggtaggggcaggcaaggatgggtcatccccctaccccacagccaaagaaattccctagaggtgtgagaatctctcttggggatggggtcaagtctgtgtcctaggtgtaccccctgccctccaccatggagggccactgtgttgtggatatggcctaatcctcacctgattttctcttaggcctgtgcagtgggactgattgccgtgggtgtcggggcacagcttgtcctgagtcagaccataatccagggggctacccctggctctctgttgccagtggtcatcatcgcagtgggtgtcttcctcttcctggtggcttttgtgggctgctgcggggcctgcaaggagaactattgtcttatgatcacggtgcgttggggcggaccaacatgggcggtctgggactgccagagcagcttggttcgggctcaggaaggtgggtgaggtgggtgggtgaggaagacctttgtgagtgtccagggaccggctgtgccaaaacgggcccctgtaatgcatagactccaaacttgacttctgtcctttgctcctgcagtttgccatctttctgtctcttatcatgttggtggaggtggccgcagccattgctggctatgtgtttagagataaggtaagcagggaataatgggaagggcctgcctcagccgggtctgggaccctggtgcttgaattctgactgcaacagtgctcctccgtactctcaggtgatgtcagagtttaataacaacttccggcagcagatggagaattacccgaaaaacaaccacactgcttcgatcctggacaggatgcaggcagatgtgagtggggttgctgggagcaggggtggtgggaatagagaattctcatctccaaggctgggtgtggtgactcacgcctgtaatctcagcacttttgaaggccgaggtgggcagatcacctgaggtcagaagttcaagactagcctggccaacgtggtgaaaccctgtctctactaaaaatacaaaaattagccaggtgtggtggtgagtgcctgtaatcccacctactcaggagggtgaggcaggagaatcgcttgaacccgggaggcggaggttgcagtgagccgagattgagccaccgctgggcacttgtctgggcaacagagcaagtctctgtctcaaaaaaaaaaaaaaaaaaaaaaaagaattctcatctccatattgaaggtgaaggttcacttaacaaccttcttctccatatttcttccctcccccagtttaagtgctgtggggctgctaactacacagattgggagaaaatcccttccatgtcgaagaaccgagtccccgactcctgctgcattaatgttactgtgggctgtgggattaatttcaacgagaaggcgatccataaggaggtagggaggagactgtgtatgggacttgggaaacctgggaaatgttttagaatgcaagagacccaggatggaggtggacagggtcagggatggggaggggatctggaaatgctaagggtggggtgaaaggtacaggggcagggaagagactgatggaccaagggagggggttggggtgggaagtttctgatggtgcttttgtcctttgtgcctgccaccttcagggctgtgtggagaagattgggggctggctgaggaaaaatgtgctggtggtagctgcagcagcccttggaattgcttttgtcgaggtaagagataaccctgagcaggggctgggactctgtccagggtgcctggagggaaggggctgaggggaggagggtgctgaacaggaggtactggcctgggagtgtgtgtttggagtctcttgcatgggtctgaggtagctagcccttctgactcctctccacccctgtccccatcgggccttctaggttttgggaattgtctttgcctgctgcctcgtgaagagtatcagaagtggctacgaggtgatgtaggggtctggtctcctcagcctcctcatctgggggagtggaatagtatcctccaggtttttcaattaaacggattattttttcagaccgaaaagagatggtctgagtttgtcttagagtgatgcttgattccttcctttccttactgatgttccctgtcctctgggaccttaatgcatgtgtacttcgaggtctattttggggggtgtttgggaaaggaggactttgcgaaggtgttggttgggcaggcagtgggagaagtgaggatcc

SEQ ID NO: 69 - DNA, 8759 bp, Homo Sapiens; identical to SEQ ID NO: 5

SEQ ID NO: 70 - DNA, 4233 bp, Homo Sapiens; identical to SEQ ID NO: 18
  unsure (2320, 2321, 2336, 2351, 2363, 2413, 2723..2726, 3730): unknown base

SEQ ID NO: 71 - DNA, 1303 bp, Homo Sapiens; identical to SEQ ID NO: 41

SEQ ID NO: 72 - DNA, 6621 bp, Homo Sapiens; identical to SEQ ID NO: 15

SEQ ID NO: 73 - DNA, 8056 bp, Homo Sapiens
agtttgtttggtcgttttagggtttgttggaatttttttttcgtttatgtatttgtgaattattttacgtttgttattatcggttttttatagggtgatgtttattagtagtggtgataggttaatttttattattttttatgcggttgaatagttatttttgaattatttttttttttagtaattttttttttttcggattttttgtagttaatttgaaagaataataaggaggtggttggaaatttgttttaaggaatcgtttgtttttttttcgttggaaattttgtatttcggacgtttttgtttttgtttttatttgattttcgttttcgttgatatttaggcgcgatgatttttgttgttagtagagggtatatttattttattttcgtaaatttgaacgcgggtgttgtttagagagggggcggagggaaagacgttttgtagtaaaatttagtatagcgattggttgtttttcgcgtttgcggtaaaggtttggaggtaggagtaatttgtaatttttaaagttgaattgtgtagtgtatcggatttggaagttattatatttatttaatatttgaacgttgagttgtaaatttaacgggtaataatttattttgaatagcgtatatgttatatacgtatttttttttttcgaattgtttttttttttggaggtggtggagggagagaaaagtttatttaaaatgtttttgggtgagggattaaggatgagaagaatgttttttgttttttatgtcgtggaataatataaaataaaaaatttcgagggaatatatattatatattaaatatagattattttagggagtaaataaattatgtgtggggttgggtaattagttaagtcgaagcgtaaataaaatgtgaatatacgtttgcgggttatatatagtgtatttttattagtatttagaaaaaattgtgagttagtgaattaggaaattaatgtttggaaggtagttaaattttaattaatttaagatttttttttttttaaaaaaaggtacggaagtaatatttttttttttttttttgattagaatcgatgtattttttgtgtatgatcgtatttttaataataaaaggggaaagaggatttggaaaggaattaaacgttcggtttgttcggggaggaaagagttaacggttttttttataagggtttttgttgattttttcggttcggtttataagttttttatttgttttttttaggaagttcggtttcgcggttcgggtattttttgttttttttatattttttcgtttagtatttttgattttttttaaattcggtagttcgagattgttgtaaatcggcgttatagggcgtaaaggggatttgttttttttgaaatttggttgagaaattgggaatttcgtgtgggaggcgtgggggtgggacggtggggtatagattggtagagagtaggtaatttttttttcgttttagtttagttttggaataggtagatatattttagggttaaatagacgtttttcgtacggggttttacggaagtttgagtaggcggggtaggaggggcggtatttgttgttttggtagtaaattgggggatttagtttgggtggaaggtatttaatttagatagttgtgtatatataatgtataatatatgattttttttaataaatgtaatgggagtttatttataacgcgttttttaagtatacgtggtaatgcgttgttgggttattttaattattttaggtatcgtttttttttttatgtttttattatttttttttatttatattaatattttacgttttgaacgcgcgtttattaatattttttttttttttattttttttgggatttttgattaaagcgcggttttttttttagttttagcgaggcgttttgtagtttggtacgcgcgtggcgtggcggtgggcgcgtagtgcgttttcggtgtggagggtagttgtttcgtttgcgatgatttatatttataggataaggatgcggtttgttaaataatattgttacggaggagtagtagagaaagggagagggtttgagagggagtaaaagaaaatggtaggcgcgcgtagttaatttatgcggtttttttattttgtttatattttagagttagagtgttcggttgttcggttgagttttttttttattttttttattttttttattttttttataagcgtttttttcgggtttttaaagtagagggcgtgggggaaaagaaaaaagattttttttcgttaattttcgtttatcggttttttataatgcgagggtttggacggttgaggattttcgagttgtgttgttcgcggtcgttatcgtcgggtttcggtcgtttttggttttttttttgtttcgagaagggtagggttttttagaggtttggcgggaaaaagaacggagggagggatcgcgttgagtataaaagtcggttttcggggttttatttaattcgttgtagtaattttagtgagaggtagagggagcgagcgggcggtcggttagggtggaagagtcgggcgagtagagttgcgttgcgggcgttttgggaagggagattcggagcgaatagggggtttcgtttttggtttagatttttcgttgattttttaggtagcggttcgtaatttttgtcgtatttacgaaattttgtttatagtagcgggcggatattttgtattggaattgataatattcgattaaggacgcgattttttcgacgcggggaggttattttgtttatttggggatattttttcgtcgttgttaggattcgtttttttgaaaggttttttttgtagttgtttagatattgaatttttttcgggaagtggaaaattaggtaagtatcgaagtttatttgttttttaatttatttttttattagtttaattttgagatgagtcgaatgtttaaatagggtgtttttttttttaattttgcgttattgatatttttttcggggtgggggttattttagaattggatcggggtatagtgatttgttaagatgggggaggagaagatagagggaaaacgggaatggtttttacgattattttttcgagatttttgttttatgaatatatttacgtcgattttcggtcggtcggatatttttattttattgtgttaattgttttttgggttttggggggcggggggttgttttgcggtgggtagaaagttttttgtattttgagttttttggagaagggatcgtatatcgtttgtgtgagttagatcgtttcgtaggcgttgatttgttttcgttttcgggagggtagttaaatttcgatttatcgtatttttgatagtcggagacggatattgcggcgcgtttcgttcgtttgttttcgcggcgattttaattcgttttgatttttttaagaagttgatatttggttttttaaaaagtaataaaataatttaaaatttgggtttttagaagtgttaggacgtggtgttgggtaggcgtaggtaggggaaaagggaggcgaggatgtgttcgatttttttgtaatcgttgatttggaaaaattagggcgaattttcgtatttagttttgatttttttgtcgcggtcgttttcgggtgttttcgcgttcgagatgcggaggaattgcgaggagcggggttttgggcggttttaaaatagttgttatttttggtggggtggtttcgggggaggtatcgtagcggggtttttggcgtagttgtattttcgtattgagtgcgaagggaggtgtttttattattatttgatattttttttgtatttatggaggggtgttaaagttcgcggttgagttcgttattttagtcggcgagagaaagaagaaaagttggtaaaaggagtgttggacgggggtagtattgggggtggggacgggggcggtggagagggaaggttgggaggggttgcggtgtcggcgggggtaggagagcgtttagggcgcgagtgggaatagtcgtagcggaggggtttcggcgcggagcggggtttacgtagtcgttttcgtttaggcgtttttcgtttttttttttaggtggcgtaaaattttgtgttttggattttggtaaattgtattttttatcgttatttttcgcggttttttaagggcgttagggtcgatttcgatttttttgtcgttgcggggtcgattttcgggttttgcgtttcgggttttcgggggagcgggggttcggcgggtattaagacgttggtttattaagtgcgttttcgagatagtaggggattgtttaaagggggtgaaagggtgttttttttatttttttattaagattatttagtcgttttaggggatagttttgtaaggggagaggttcgggattgtggcgcgtattgcgcgttgcgttaggttttcgtattaagatttttttaatttaagattgtttttcgttttgtgtgtttcgttttagtagtttttcgcgacgatgttttttaacgttagttttattaataggaattatgatttcgattacgattcggtgtagtcgtatttttattgcgacgaggaggagaatttttattagtagtagtagtagagcgaattgtagttttcggcgtttagcgaggatatttggaagaaattcgagttgttgtttatttcgtttttgttttttagtcgtcgtttcgggttttgttcgtttttttacgttgcggttatattttttttttttcggggagataacgacggcggtggcgggagtttttttacggtcgattagttggagatggtgatcgagttgttgggaggagatatggtgaattagagttttatttgcgattcggacgacgagatttttattaaaaatattattatttaggattgtatgtggagcggtttttcggtcgtcgttaagttcgttttagagaagttggttttttattaggttgcgcgtaaagatagcggtagttcgaatttcgttcgcggttatagcgtttgttttatttttagtttgtatttgtaggatttgagcgtcgtcgttttagagtgtatcgatttttcggtggtttttttttatttttttaacgatagtagttcgtttaagttttgcgtttcgtaagattttagcgtttttttttcgttttcggattttttgtttttttcgacggagtttttttcgtagggtagtttcgagtttttggtgttttatgaggagatatcgtttattattagtagcgattttggtaagcgaagttcgtttaggtttgttaaaagtgggcggttggatattttttttatttttattggtagtttatttaacgggttatttttattaggaaggagagatagtagatttggagagatttgggagtttattatttttgaaattttgggttttagcgtttttttttattttttttttttagattgtttatgtttgtagttttttttttcgtttgttttttattttttaggaattttatttaggtttttaaattttttggtttattttataatttaatttatttttttttatttttcgttaatattttaattgttttggggcggggtggtagggagtgtatgaatgaggataagagaggattgatttttgagagtgaatgaattgttttttttttaattttcgagaagtggtgggatttaatgaattatttataaaaatgaggggttgtgtttagaggttaggtagggtttgtttgagtgcgggagttagtgaattgttttaagagtgggtgggttgaggagttgggatttttttagtttattttgaatattgaaaagtaaatttttgttaaagttggatttttttttttttttattttttttttcgtttttttggatttttggtaaaattgtaattttttttttttttattttttatttttagtaaaatagggagttgttaaagttatattaagtaatttgtagttattatttgtaatatttgaagtgtttttggtaaagttttttaaaaataggaggtgtttgggaatgtgttttgttttgggtgtgtttaaagttttattaagttttaggtaagaattggtattaatgttttattttgggaagttgtattttttttgtttatgttataatttagttgtttttttttttatgagatttttatttttatggtgagaggagtaagggtggttggttagattggttttttttttttttttttttttttttaagacggagttttattttgttattaggttggagtgtagtggcgtaattaatttttaattttttggtttaagagatttttttgttttagttttttaagtagttgggattataggtgtatattattatgttaggttaatttttgtaattttagtagagatggggttttatcgtgttggttaggatggttttttttgattttacgattcgtttatttcggttttttaaagtgttgggattataggtgtgagttagggtattaggtttagatgtggttttttggggagataattttgtttagagatttttttaacgtatttatgttttgtatttgtatagtattaatttggtaattgattattttaatgtaattttgttaaaggagtgatttttatttttttttttaaagaggaggaataagaagatgaggaagaaatcgatgttgtttttgtggaaaagaggtaggtttttggtaaaaggttagagtttggattattttttgttggaggttatagtaaatttttttatagtttattggtttttaagaggtgttacgtttttatatattagtataattacgtagcgtttttttttattcggaaggattattttgttgttaagagggttaagttggatagtgttagagttttgagatagattagtaataatcgaaaatgtattagttttaggttttcggatatcgaggagaatgttaagaggcgaatatataacgttttggagcgttagaggaggaacgagttaaaacggagtttttttgttttgcgtgattagatttcggagttggaaaataatgaaaaggtttttaaggtagttatttttaaaaaagttatagtatatattttgttcgtttaagtagaggagtaaaagtttatttttgaagaggatttgttgcggaaacgacgagaatagttgaaatataaatttgaatagttacggaatttttgtgcgtaaggaaaagtaaggaaaacgattttttttaatagaaatgttttgagtaatcgtttatgaatttgttttaaatgtatgattaaatgtaattttataattttggttgagttttgagattgaaagatttagttataatgtaaattgttttaaattggattttgggtataaaagaatttttttatgtttattattttttttttttttttaatagatttgtatttaagaattgtttttaaaaaattttaagatttatataatgtttttttgtaaatattgttattaaatgtaaataattttaataaaacgtttatagtagttatatagaattttaattttagtatatagtatttagtattataggtattataaattttaattttttttatttaagtatattttgttttttaaagttgatttttttttattgtttttagaaaaaataaaataattggtaaatatattattgagttaaattttaagttgtgaatgttttgtttcgtttttttttttttttaattattattatttttgtttgtttttattaattgtttttttagagggtggttttaagaaaggtaagagtttttttttgttgaaatgggtttgggggttttaaggtttttaagtttttggaggttttaagatgttttttggagattatgataatagttagagttgatagttagaaggaatggtagaaggtaggtgagaaggtgagaggtaggtaaaggagatataagaggttaaaggtagtagttaagtatataaagaggtataaggattggggagttgggaggaaggtgaggaagaaatttttgttattttagttaattagtgttagttttttgtttattttaaatttaggaatt

SEQ ID NO: 74 - DNA, 18 bp, Homo Sapiens
ctggtccgggaaaggcaa

SEQ ID NO: 75 - DNA, 18 bp, Homo Sapiens
ggtgggaagcgcatctac

SEQ ID NO: 76 - DNA, 18 bp, Homo Sapiens
atccagctcgggggagga

SEQ ID NO: 77 - DNA, 18 bp, Homo Sapiens
tgccatcccggagggccc

SEQ ID NO: 78 - DNA, 18 bp, Homo Sapiens
gcccagccagcgggctcc

SEQ ID NO: 79 - DNA, 18 bp, Homo Sapiens
gagctcaacgtagcaagg

SEQ ID NO: 80 - DNA, 18 bp, Homo Sapiens
tccgaaacagagacctga

SEQ ID NO: 81 - DNA, 18 bp, Homo Sapiens
tcacagctcgagctttcc

SEQ ID NO: 82 - DNA, 18 bp, Homo Sapiens
tgcagtgagccgagatca

SEQ ID NO: 83 - DNA, 18 bp, Homo Sapiens
tctggtgcgcgcagagaa

SEQ ID NO: 84 - DNA, 18 bp, Homo Sapiens
cataccattggcactcca

SEQ ID NO: 85 - DNA, 18 bp, Homo Sapiens
gggcgctggggccaggcg

SEQ ID NO: 86 - DNA, 18 bp, Homo Sapiens
cccacccccgtccttggg

SEQ ID NO: 87 - DNA, 18 bp, Homo Sapiens
cttccccgccgccgccgc

SEQ ID NO: 88 - DNA, 18 bp, Homo Sapiens
ccaatagcctagggacca

SEQ ID NO: 89 - DNA, 18 bp, Homo Sapiens
ctcaagggcgggaagtgg

SEQ ID NO: 90 - DNA, 18 bp, Homo Sapiens
ccataaagcaagtgaaca

SEQ ID NO: 91 - DNA, 18 bp, Homo Sapiens
ggctgcgccacgataaca

SEQ ID NO: 92 - DNA, 18 bp, Homo Sapiens
ggctgcgccacgataaca

SEQ ID NO: 93 - DNA, 18 bp, Homo Sapiens
aatgtacatcaaaggcat

SEQ ID NO: 94 - DNA, 18 bp, Homo Sapiens
aatgtacatcaaaggcat

SEQ ID NO: 95 - DNA, 3460 bp, Artificial Sequence
  chemically treated genomic DNA (Homo sapiens)
taagagtagaatattagtaataataattagtttaaaaaaataaatatatattaatataaagaatagtataaggtaagtaaatatttgggtttatattaatagacggtatttaaggatatggttagaatttttaaaatgtttaataatgtgtaatttttggtattaagtcgttaatttgaatatggttttttaatatgaaatgttatataatgatagattttattatagtttgatttaaggtttttgaattttttaaaagggtaataaaatagatagatattgtatttttttattagttggtattggtggtatttttttgagtgttatttttggtattacgtgtagaggttgatagatttaagataatattaaatatgttagtagttattatacgtaggttgtttagtagaatgatagcgttttttagattttagaaagtatttagagttattgtatttattttttgggggttttgtagttttgtatttttagatgatgggagttgtaaatttttttgatggtgtttttttggatgtttatgaggtttgatttggtattacgattttagtagtaggtttatttaatggtagtaaaaatatatgttgtatgttgattagaatttggtaggatatatgtggaaagttaatgatattttggtcgagaatttttgtgatatatattggttatattttgtttaattggagtttttatgtgttgtttttggtagagttaagtgaagattttgttatttagttatttttgaggtattgaagatattcgggtttttgttattataggataggttagaaagtagttagggttttataattaaggttttttttgaaatatataatgataatgttagttatttgattaaagatatttaatgttttaatttatttggaatttatttttgatgtgaagggttagtattatttattggtcgggagtttgatttttggagttaggtagatttgggttgagtttattttcgtttgtttttagttgtgggtaaggtgtttgatttttttgagtatttgtggggtttgtttgtttttaaatttgaagaattgggataatttgtttttttatagaattattacgtagatgtaatatagttaatgaaggtaatatggtatataggaagagtataatatacgttagtttttattttttatggttagaagatgtggattaaatttttttttttatagttttgtgattaatattatttatgaaagaaataaatgaaataaatttttttttttgttatgaggggaatttatttgattttattgaattatttggtgttattgagttttttattgtttttttttgatttagatttttgggtgtgcgttagtaatacgattgtgattgttgttgttttataatattgtttgtggttagtttaaataagagtttaaaataattgaatgaaatggattttaaataatggtttttttatttttatttcgtggtattcggttaaaggaagaggaaaagttttttgttaaagaaaatgaattagagaagaggtttagatcgtgttttcgaaaatttttattgtagggattaagtttttttattttgaatttatattcgtttgttcgtagtttgattttatattttggtttggatgtgcggttttatcggggtgtcgtgcgtacgtgtggttgttttgtgggtgttagttttgattttttttttagatatttattgttttagttttaattataggacgcgcgttgagtagaaatgagattagttagtattggtaattgtagaggaatatgtatttttattagcgttttcgggttagagggtttgtttggtatcgcgtattgggaaattcgttaaaagcggtgtaggttggagacgttttaggtcgcggtggagttgcgcgcggtttttaaagtggagtggagtaggtttgtatttttttcgtcggggttgggacggcgtttttaggcggagaaagattttcgcgggtcgcgcgcggttttttttttgcgaggatcgttattggttcgggttggttttggaaagcggcggtggttttgggtcgggttcggtttcgggaacgttaggggtttttgggtgcggacgggcgcggttaggagggggttaaggcgtaggcggcggcggggcgggggcgggtttggcgggcgtttttttcgggttttttgttaataggcgcgtttcggttaggcggagacgcggtcgcggttatgggcgggcgcgggcgcgcggggcggcggtgagggcggttggcggggtcgggggcgtcgggggggcgcgcgggtcgagtcgggtttgagtcgggttcgcggatcgagttgggagaggggtttcggttttcgacgtgttggcgcgggaaaatgttggagatttgtttgaagttggtgggttgtaaatttaagaaggggttgttttcgttttttagttgttatttggaaggtaagttcgggtcgtacgggttgggttgagtagtcgcgcgttttttcgttgttgttgggttttttttaggtttcgtcgttcgcgcgttttcgtttgcgtttttttcgggttttgttttttttttttttttttttttttttttttttttttttttagtttttttatattttgtttttttttttttttttttgtgtttgttttttttttttttttttgtttttttttttttttttttttttgtttttttttttttttcgcgatggtttttaggcgtcgtcggcggagcgtggtttttagtttcggtattagtttcggtagagttacgtcggatggtgacggcggcgttcggggttttatagtgcgggttttttcgaaaaagtttgagaaagttaattcgttaggttttaatatttttgggattttacgttgtggaatttttatcgttaattgggattgtgtgttaaaaagatcgattcgtgtttgtgaaaatatgcgatttttattaagtattatgtatataaggagtattattttattatttatggatatagaattttaagtgatttttttattttttttatttttattttatttatagattacgaagaggttttaggaattcgttttttttttaggggaggggagtttatttaagaaggcgtttttaaggagttttttagagtattggggtgttatgttcgtttttttaagtgaagtttagggttaggagggttttatttttgcgttttttttatttattttttttttttaattatatttgttttattttattttttttttttgttgtagtttttagttttataaatggaaaaaaagtaaattaagggttatgggtttttattttcgtagtttttaggtgggtatgaaattgatttgatttgagattggtgtttttagattattgtttttagtagaaaggttatttgtgttttagagatggagtggtatttggatttttttgttgtttttaattaagaat

SEQ ID NO: 96 - DNA, 3460 bp, Artificial Sequence
  chemically treated genomic DNA (Homo sapiens)
atttttagttgaaaataatagagaagtttaagtgttattttatttttgaagtatagatagtttttttgttgaaggtaatggtttgggagtattagttttaaattagattaattttatatttatttagaagttacgaaagtgaagatttataatttttaatttattttttttttatttataaaattaaagattataataggaaagaaaaataaaataaaatagatgtaattagagaaggagagtaggtagaaagaacgtaaaagtgaagtttttttggttttgagttttatttaaggaaacgaatatgatattttagtattttgggggattttttggaaacgtttttttaaatgggttttttttttttgaaaagagagcgaatttttaagattttttcgtggtttgtagataagatgggggtgggggagatggaaagattatttgaaattttgtatttataaatggtagagtggtgttttttgtgtatatgatgtttaatggaaatcgtatgtttttataaatacgggtcgatttttttaatatatagttttaattaacggtggaaattttataacgtgggattttagggatgttaaggtttggcgagttggtttttttaaattttttcgggggagttcgtattgtggggtttcggacgtcgtcgttattattcggcgtggttttatcggggttggtgtcggggttgggggttacgtttcgtcggcggcgtttaggggttatcgcgagaaagagaaagagatagagagagagaaaaagagagagataagagaagagaaaagagatagatatagagagaaagaaagagagatagaatataagagaattgaagagaagagaagagaagagggaagaaagaaaaaaaagataagattcggggagggcgtaggcgggagcgcgcgggcggcgaggtttaggaagggtttagtagtagcgggagggcgcgcggttatttagtttaattcgtgcggttcgggtttattttttagataatagttggaggacgaggatagtttttttttggatttgtagtttattagttttaggtagatttttaatattttttcgcgttagtacgtcgggggtcggaattttttttttagttcggttcgcgggttcggtttaggttcggttcggttcgcgcgttttttcggcgttttcggtttcgttagtcgtttttatcgtcgtttcgcgcgttcgcgttcgtttatggtcgcggtcgcgttttcgtttggtcgggacgcgtttgttaataaagggttcggagagggcgttcgttaggttcgttttcgtttcgtcgtcgtttgcgttttaatttttttttggtcgcgttcgttcgtatttaggggtttttggcgttttcgaggtcgagttcggtttaaagttatcgtcgttttttaaagttaattcgggttaatggcgattttcgtagggggaaggtcgcgcgcggttcgcggaggttttttttcgtttggaagcgtcgttttagtttcggcggggagggtgtaggtttgttttattttattttagaagtcgcgcgtaattttatcgcggtttggggcgtttttaatttgtatcgtttttggcgagttttttagtacgcggtgttaggtaaattttttgattcgagaacgttggtgaaaatgtatatttttttgtagttattaatattaattggttttatttttatttaacgcgcgttttgtgattaaggttgaggtagtgggtgtttggggaggaagttagagttggtatttataggataattatacgtgcgtacgatatttcggtgaggtcgtatatttagattaggatatgaggttaggttgcgaatagacgggtgtgagtttagagtgagaggatttagtttttataatgagaattttcggaggtacggtttgggttttttttttgatttattttttttaatagagaattttttttttttttttggtcgagtgttacggggtgagggtggggggattattgtttaaaatttattttatttaattattttaaatttttgtttggattgattatagataatgttataaagtagtaataattatagtcgtgttattggcgtatatttagaaatttaggttagagggaaataataaggaatttaatggtattaaataatttaataaaattaggtaagttttttttatgataggaaaaggaatttattttatttattttttttataaatggtgttaattataaaattgtaaagggggaagtttagtttatattttttagttatgaagagtaagagttgacgtgtattgtgttttttttatgtgttatgttatttttattaattgtattgtatttgcgtaatgattttgtgaggaaatagattattttaattttttaggtttaaaaataaataaattttatagatgtttagagaagttagatattttgtttatagttggaaataggcggagatggatttaatttaggtttgtttggttttaaggattaggttttcgattagtggatgatgttgattttttatattaagaataaattttaagtggattaaagtattggatatttttggttaaataattagtattgttattatatgttttagagaaagttttggttatgagattttggttattttttagtttattttgtaatgataaaaattcgggtatttttagtattttaggaatggttaagtaataagatttttatttggttttgttaaaaatagtatataaaaattttagttggataggatgtaattagtgtatattataggggttttcggttaggatgttattaattttttatatgtgttttgttaaattttgattaatatataatatgtatttttattgttattgaatggatttattgttagagtcgtggtattagattaggttttatgagtatttaagagggtattattagggaagtttgtagtttttattatttggagatgtaggattatagggtttttaggggatgggtgtagtgattttggatgttttttaggatttgggaagcgttgttattttgttggatagtttgcgtgtggtgattgttaatatgtttagtgttgttttgaatttgttaatttttatacgtaatgttaaaaataatatttaaaagggtgttattagtattaattagtgaaaaaatatagtatttgtttgttttgttgtttttttggaaagtttaggggttttggattagattataataaagtttgttattatatagtattttatattaaagggttatatttaaattggcggtttaatgttaagaattatatattattaggtattttggaaattttagttatatttttgaatatcgtttgttaatataggtttagatatttgtttgttttgtgttgttttttatattggtatatgtttatttttttaagttaattattattattaatattttgtttttg

SEQ ID NO: 97 - DNA, 35962 bp, Artificial Sequence
  chemically treated genomic DNA (Homo sapiens)
gattatgttattagtgaataaaaatatttttatttgttttattttaattgggatgttttttattttttttttttgttttattgtatggtttaagatttttagtaatagaagattttagatagaggttaatgatttgggtttgaaattttattttgttatttattagttgtgtgattttgggtaagttaattaatatttttgtgttttaggttttttatatgtaaagtggagtgatatttagtttttaaggttgatatgaggattaaatgggataatgtttatatgtgaatatatatatgatttagtgtttggtatatagtatgtgtttaataaattggaatttttgttaatataagtatgtttttggcgggtgagaagggtggtagatgtttttattatttattttattgggtagtttttagaggatatttgaggtagttgtttgtattttttttttttagttttttttgatgtttatttttttttttttttttttttttttagacggagttttgttttgttttttaggttggagtgtagtggtacgattttagtttattgtaatttttgtttgtttagtttaagtaatttttttatttttttgttttagttttttaagtagttgtgattataggtatgtattattatgttcggttaattttttatatttttagtagagatagggttttattatattggttaggttggtttcgaatttttgattttttaaagtgttgggattatagatgtgagttatcgcgttcggtcgatgtttattatttttgaattttttgaattagaggaacggatattttgagtttttagttttttttttgttttgtaggtggtttgttgggatgtatgtttgtggatgagtagaggaagttatggatagtggtaggttagttgttaggtatggttgtttttttataatatgattgttttaggatagttagattttttatgtgttagtttagggttttaaaggtaagtgttttaagagaattaggagggtcgggcgtagtggtttacgtttgtaattttagtattttgggaggtcgaggcgggcggattatgaggttaggagattgagattattttggttaatatggtgaaattttatttttattaaaaatataaataattagttaggcgtggtggcgggtgtttgtagttttagttatttaggaggttgaggtaggagaatggtatgaatttgggaggtggagtttgtagtgagttgagattaggttattgtattttagtttgggttatagagtgagattttgttttaaaaaaaaaaaaaaaaaaaaaaaaaaaaggagaattaggaggaagtggtatggtttattttgatttagtttttgaagttatatagaggtatttttgatatatgttgtttattaaagtagttagaattttgttttgtggtaggagaggatgtatagaatttatttttttttttttttttttttttttttaatacggagttttgttttttttgtttaggttgcggtgtagtggtataatttcggtttattgtaatttttgttttttgggttcgagtaatttttttgttttagtttttcgagtagttgggattataggcgtttgttattatatttggttaattttgtgtttttagtagagacggggttttattatgttggtgaggttggtttcgagttttcgattttaagtgatttatcggttttagttttttaaagtgttgggattataggtttgagttattatttttggttagattttattttttgattgaagaagtatgaaaatatttagggatatgtttaatatgattatagatattgatattgtttttaatatttttagaataagtgatgttttgatgagtatttttaggttgaaatttgtgtgtacgtttttgtttagaaagtttatgtagttggttaggcgtagtggtttacgtttatagttttagtattttgggaggtataggtgggcggattatttgaggttgggagttcgatattagtttggttaatatggggaaattttagttttattgaaaatataaaaattagttgggcgtggtggtaggcgtttataattttatttatttgggaggttgaggtataagaattatttgagtttgggaagtggaagttgtagtgcgttaagatcgtattattgtattttagcgagattttgttttaaaaaaaaaaaaaaaaaaaggtttatgtagttatttttattattttattattttaatggaatacgaggtgaatttagtaggtagatgaggattgaattaagagttttgggttagagagtttttgttgtttttgtttttatgttttttagaatttttttgttagttatttttatttggagtttatttgttttttattttaattttttagggtttatggtttttttattttaaggtttatttaaatgttttttttgttaggtaagtttttttgtttgtttttttttttttttttttatttttgaatattttagtattttgatgattggggttttaaatgatttagttttgtggttttatagtatatagttggtgtttagtaaatgtttgttgaaaaagtttatttattaatttaatagagatttattgagagatttgttgttgttgttgttgtttgtttgtttgttttaatggagttttattttgttaattaggtttgagtggaatggtataatttcggtttattgtaatttttattttttaggtttaagtaatttttttgttttagttttttgagtagttgagattataggtatttgttattatgttcggttaatttttgtatttttagtagagatagtgttttattatgttggttaggttggttttgaatttttgattttaagtgatttatttatttagttttttatagagttgggattatagacgtgagttattgcgtttagtagagagttgttttaagggttttgaaatttgatatggtatgttaatatggaaatttttgttttagaaataagaggtagggtgcgttatgtagagtcgtataggaaagtatcgggttggttaggaggtagagggaaggaggggtaaatatgagtaagagtttttattgtggtttttatgggaaggaatgggtgaggtaaggtaagtagttttaggattggttggtttgaataattgtagtaggtgttggggtttatataagggttttttttagttgtttggtgtttggttttgggatgattagggtagttggatattggttttgagtaagagagtttaataaaggaggtgtttgtgggtgtgggttttggattgggtggtatgtatttgtaagggattttttgggtgagttttttattatttttaggaattagttaattttggttggggtagtttttttgggaagagtaagtttttaagattttaaagtatttgagtatagaaaagtaaaggttttgggtatagtggtttatatttgtaattttagtattttgggaggtcgaggcgggtggattattaggttaggagttcgagaatagtttggttaatatggtgaaatttcgtttttattaaaaatatagaaattagttaggcgtggtggtaggtgtttaaaattttagttatttaggaggttgtagtaggtttaagaggagaatcgtttgagtttaggaggtagaggttgtagtgagtagagattatattattgtattttagtttgggcgatagagtaggatttcgttttaaaaaaaaaaaaaaaaaaaaaaaaaaagagtaaatgtatgtttaatataagggtttattatatattaagtatatatacgaaatgggtagtgaattaaatggatagtttgggtattggtggggtttatattttgtgggaagataggcgatgagtagataagtaaatttgtattttgtaaatatattgtattttttttaataaatattttatggttgttttgtgtgttaggtttggatttaagtattgatatatgatgaatagaatagataaagtttttgtttttagtaatgtatgttttagtggggggagattgtaattaatgaataaaaaaaaaaaaaaaaagaaagaaaattgaagtttaggtatggtggtttatatttgtaattttagtattgtgggaggttaaggtgggtagattattttaggttaggagattgaaataagtttggttaatatggtgaaatttcgtattttttaaaaatataaaaattagttgggcgtggtgatgggtttttgtaattttagttatttcggaggttgaggtaggagaatttttttaatttaggaggtagaggttgtagtgagttgagatcgcgttattgtattttagtttgggtgataagattaagttttttttttaaaaaagaaagaaaagaaaagaaaaagaaaaattagtgataagaagtaaaataggattaagggattaaaaaaaaggattggaaagttattttagataaggtgattagggaagttttttttgaggaggtgatgtttgagtaagttatgagtgaggagaaggagttagttatataaaagtttgggagaagagaatttatgtagaaagagattagagtgaagggttttggagtgatgagaagtttggtgttgtggaatcgaggggaagttagttagttttgaggtaggagaatagggtttggaggtagggaatataaggttgatttatattgattttttagaattaaattaaaaggaaaattttaattttttacgtttaagtaattaaaggattagaggttattttttttgtaattttagtttttttgtgtgtagatgaaaaattgaaagtatttttgattgttttttttttattattagttaggttggtaggtggttaagtttttatttgtatgggagtataattttgtaattttattttagtttttgattgataattttttatagttaattagatattggcgtagggtgtaatttttaattttagtttttgattggttattttttataattaattagattgattacgggttatttttttatttatatagggcgtatattaaataattaatgggaaatttttagagggtatttaaattttagaaatttttgtaaggagtttgttgagtttttttgtttgagttgtttttgttttgtagagtgtattttcgtttttaataaatttttgtttttgttgttttattttttttttgttttgtttgtatgttttgtttaagacgtcgagaagttgggtattttttatcgttaatagttcggttgtagtatagtgagtaacgtagtgggttaggacgagcgtgaggttagagataggtaggagttaagaagtgttggaagtagagaagtgatttaatttgtttttaaagttttttttggttgttgtgcggagattggatgataggaaggataaaagtagaattaggaagataagttaggaggttatttttttggtaagagatgtcgttgattagtttggggtagtggttgcggagatgtatagatgtgtggtattagtgaattttagatttttttcgttattgaaattatatagggagttaaaatacgtatagatttttggattttatttttgtagagttttgtgaaaggtaaataaattttggggttttaaaattattaagttaaagggaaaagtaagttaagttgggaattgtttagggtaaatttgtttttcgttttatttaaagttatttttttgtttattgagataaatgtatatttgattgttttttttggagacgttaattagaaattaaaaatataaaaaatgtaattatttgttttttttttttttttttttttttttttttttttttgagacggagttttattttgtcgtttaggttggagtatagcggtgcgatttcggtttattgtaaatttcgcgtttcgggttgaagttatttttttgttttagtttttcgagtaattgggattataggtattagttattatattcggttaatttttttttttttttttttttgtatttttagtagagacggggttttatcgtgttagttagggtagtttcgattttttgatttcgtgattcgtttatttcggttttttaaagtgttgggattataggcgtgagttatcgcgtttggttttaattatttgttttttatttatttattattaggaagtttttttttagtttcgagttgtttagtttttttagatcgaattaatatttattttatatatgttgattgatgttttatgtttttttaaaatgtataaaattaaattgcgtttcgattattttgggtataggttgttaggattttttgagtttgtgttataggtatatttttaattttggtgaaataaattttttaaattaattgagatttgttttagatattcggggtttatagatttaatgtttaaggaatttatattttttataagttttttgggatgtgttgtttcgttttcgggtatttatttgtttattggtcgtaaaggggtaagtgtggtcgggtttggtggtttatgtttgtaattttagtattttgggaggttaaggtgggcggattatttgagtttaggagttcgagattaggttgggtaatacggtgaaattttgtttttataagataaatataaaaaattagtcgagtttggtggtatgtgtttgtagtttaagttatttaagaggttgaggtggtaggattatttgagtttaggaggacgaggttgtagtaagttataatcgtgttattgtattttagtttgggtgataaagattttgtttcgaaaaaaataaaaataaaaaaaggtgcgtgtgatgatgtagaaagaggagtattggggatgggagagggggagtttttgtcgttttggattttagttttagttacgggtttgtttggggggttcggtggttttaagtgattattagggatagtaatgtttatttcgaagatgggttgaaagtgaggaatatataatatagtatttgtaaagtatttagtaaaggattagtcgaagtattcgggttatttttggtaaagggtgtaggttttggggtaaatcgcgtgtagttggaatatatatcggttttgtagttatttgttaatgtgaattttattttttttggggtttcgatttttttttttataaattggtatttataatgttaattttgtgaacgttgtgagaatgcgcggggtaaaggcgacgtttttttttttcgggaagaatttggatggtgttaggtttatattttcgtttcgtttagggtcgttcgttgggtttggtttttcggttgtcgggttacgcgagtttagaggatattatcgtttttttatggtcgcggtaggattggatcgaggggttgggttttagtgtttttttttaggtacggtagagggcgagggtttggtagttcgtttatttagggtttcggggtattagtatttatgttatcgattgtttggtagggttggtttttttaagtgtggtcgtgagatttgtttaagtggaagaaatgttgtcgttttggagatttataaaataattggttcgatggatttttttttaggaggcggatttggtttatcggttttattgattatagttgatgttaatgattttatttaatcgtttttagagtttttgtgtatggggagttattatttttaattagttttttgtgaatgtagggtaaggagagggagagggtagtgggggacggggagaaggggcgaggggtatttttttattaaaacggagtcgtagaaaaatttatagagatattcgtttgtttttcgttgagtttttagaatagcgtttggtatatagagagcgtttaattcgttgtgtaattaaatgtaagttaagattttcgtattgtgtgtgttttttttttttttattaaatatatttggtttgtaaggtttgatttgtttttttagacgatttttaatttgtttttaaaagaaatattggagtaaattagtttgtttaaaggagtttttatgaaaggatagaattaagtgagaagtatttggagttcggtttggggttatagatgatgatgttgagttagtatttacggggcggtcgtaatgtagaattttggcgttattgggaatcgtgtggaaaggggtttttttttttgtttaaatagtgttttttgtagattttatttttttatttttttgagtttttttttataaaatatcggattttagtagtttagaattggatagaaatttagaggttcgttttttaattatttttaattttggtaaataataaatgggatgatgagtataagatagttttggtaaaaagttatacgttatataacgtgagattttattattttacgggtgtttttttgttaatagtagatatggtagttcggttttttttttttcgggttcgttttattgttgttaattgtaaatatggtttttaggtcgtgagtttttattggtagttgttttgagttttcgttttttttcgttttttcgaacgcggtttggagttgtggagtcggatatcgtagttttcgattgagttgcgtttgcgtaatttattggcgttaagatggcgatggagatgaggtttttagtggttcgtaagttttttagcgagagattgggtcgcgatattaagaaatatttagtggtgtcgggggatataattattacggatataggatttatgcggtacgtggggatttgggggagtcgaggttttagagagcggttttagggttttttgtacgtggtttaggtttcgtatttttgtgtgtgtaatttttcgcgggatttagggtatttcgtttgagtattttatatatttcgttttcgagtttcgtgttttttgttttttgtattttgtgtgttttcgtttgtatttgttttagttttttgaaattttttatttttgattttcggtggttgtgatttttgggttttttgtttgaagtttaaatttttgatttttttttgtgggagatttggaaagttggggagggttaggtgtaggtttttttttagtttttagttttttgaggggacggtgggcgtttttggttgttttttttttagtttagaattcgtaattgttcgattttagggtaaatagttatattgtgttgtatgtatttatttatatatattttgaatttaaggggtgtagtgtagtgtattgtggttaagagggaaggtttttgagttagatagttggggtttcggttttgttattattatattttattagcggtattgtttttttacggttagtttttttatttgtaagatagtgataataatagtatgatacggtaatgaggattaaatgagataattatgtaagaaaagaagtaaaattagttattatattattatagataatattagtgttttaatttttattattattatttttttatttgtatatgtataaggggtatagtatttatagtattgttttttaatttgttagtttaaggttagtggatattaggaaattttttttttttttttgagacggagtttgttttagattagtcgtgcgatttcggtttattgtaatttttgttttttgggtttaagtgatttttttgttttagttttttgagtagttgggattataggtgtacgttattatgtttagttaatttttggttttttttttttttagtagagatagggttttattgtgttggttaggttggtttcgattttttgattttaagtgtgatttgttcgtttcggttttttaaagtgttgggattataggtatgagttattatgtttggtttttaggaaattttaagatttatttttttattaatgtttttaatatatattttgtgtagttgggttattatggtagagtgaaaaatttttgttttggtggagttttaatagggagagatagataataagcgtaatgaataagttatttagaatgttaggtaataatgtaatagggaaaaaagtggagtagggttaatggtatgtggggggaatggtggtaatagggtgggttgtgtttttaatggtatagttaaggtaggtttgttgtagaaagtgatatttgagtagatttgagtgagaggagtgatgtttaagtagttgtttggagaaggagtattgaaggtagagggagtagttagtatagaagttacgttttgtagggggagtttgttagttttgaggaatacgttgtttttgaagggagagaagttatttcgagttattttcgtattttttttttgtattttcgttttgtattaggggttatggaacgtatatgggagaagagaagtttattgtatttgttgttggttttgtggagagagtaaataagttgatttgtgtgaaagttttgaaaattaggtgagaataaaaggtgtgtatttttttttttgtagtattaggttgtataattaggttttttttgttttttttttattttttattttatttttgtttgttttgttatgttgtaagtttgaggttttgattatgattgtaggtggggtggtgtagattagtgtaggttttagaggtttttttatgttatgttattattttaagttttggttattttttttgtaaagtgagtataatagtatggtttattttataggatttttttttttttttttttttttttttttcgagatggagttttattttgttgtcgaggttggagtgtagtggcgtgatttcggtttattataattttcgtttttcgggtttaaataattttttttttttagtttttcgagtagttgggattataggcgttttttattacgtttggttaatttttttcgatttttagtagagatagggttttattatgttggttaggttggtttcgaattgttgatttttgatgatttttttttatttggttttttaaagtgttgggattataggcgtgagttattgtgtttggtttaggattttttttagaatttagtgagatggtgtttgtaaagtatttagtatagagtttgatatttagaagtatttaatgaaggttagttttagaaagtaagttagtggggttggaatagagtgagtgagggggagagaaggggtagatgtaagtagagagttgaggtgggcgggcgtgggtttgttttgtagttagagtaagtattttggtttttattttgtgtaatttgggaagtattggaaggggtggagtagaggagggatttgatttggatttaagtttattttggttgttgatgggagattgaagggggatagggtaagtttagggaggtggattagggattatatttatgatttgaagtgatggtggttttaattaaggtgggagtagtggaaggtggaggagtgattggaatttatatagattttatttttcgagtgtttttttaaaattatgaaaagttgttgggttttgtattttttgggttttattgtgtataggatttcgttaattgtgaatagaaataagtttatttttttttttttaatttggatgttttttattttttgtatatgttttaagggtagagttaataggttttgttattggatttgttttggagcgtgagagagagagaggaattaaggaatttttcgaggtttttggtttgagtaattgaggggatggagttatcgttgattgagatggggataatttattttttatttcggtttgttatggaggattggagggggttgcgggaaagtttagttttgtgtttgatatatttgaaaatgtttgttagttatttagatggtagagttgggtagttagtagttgagtaggatttggaatttaggagagtggtatagttatagtatagagtggtgttttaaaggtattagattgagtggtcgaaaagtgaagaggtttaaggatttagttttagtattgagtacgttttattagaatcgcgggtaaggaattagtaaaggggtttgagaggagtaggtagtgagtaagtggaggagacgtgagtagatttgtgtggttggagttttggtttagattttttttttttttttttggttggtgtagaatttatttatgtgttataggaaaatagttcgtgttttttattgtcgtgtaatcgaataaaatagggtttttgggttaaatgaattatttggaatggtgatatgtttaaggatagttaatggagattttatacgtggaggaatgtttgaagttagtagtttttgaaagtaagtttagataatatagttatatgaatttgttgaatgtggcgtttgttttaggtttttattttgttgaatcgatattttaaatggtgtgtggttttgttagaaagtttgtttatagatggatgaattttttgtgttttgttttttagatatattggtgaagtaggagatatcgtagtgggacgaattatagaggtaacgtcgatattagattggtgtttataaagtcgaggtaggttggcgattttatttatgggatagttattttatttgtagttatatgaaaaaggtatttattgtatttggtcgttgtgtggtttttgatgtaaatatgtggtttgttcgattttagattattggtttatgtttttttttttttgagatggagtttcgttttgtcgtttaggttggagtgtagtggtatgattttggtttattgtaatttttattttttaggtttaagcgatttttttgttttagttttttaagtagttgggattataggtattcgttattacgtttagttaatttttgtatttttagtagagatggggttttattatattggttaggttggttttaaatttttgattttaagtgatttattagtttcggttttttaaagtgttgggattataggcgtgagttattatatttggttttattggttatttatgatatgatatatgaatatggagtatgtgtttaggtgtggaatttggtttataggtttaatagaagaggtggaaggtggagattaattttaggttggattcggttttgttgttttcgtttatgaatttttttggaggagagttggtaagggttatagttggggttatggattagggtttagtgggttggggggagtcgtgggattttttgttttattagaggattttgatttatattgaggttgtttttttgatttttgtttgtttgttgtgaagtttgttgtttagatgtgtatgtagattttttattttgtttaggtttttcgaaagagggagtagttggtatatggtaggattagaaatatttatggggtgggattttaatagagagttggggagagaagtttttagatgttggttgttaatagttttttttttggatataatagttttgtatagtgaagatgttttttgaaaagttgtttttatattaggtttttgtgaattgaaaggtattttatttaattatgtgtggaatgtggttgttggtattttagataattatagtaattaagttatagttttttgtaaaatgttatggtttattttgatttttagtttagcgtgtatttatagagaggtttattgtgttaagttttgtgtcgagtgttaagtacgattgagttttttagtaggggatataagataattgatttagtttttggtagtagaagaataaataagttgtggttatataaaaggaaattttagtgagagaagtttgtaggaaagataggtattggagttgattttggaaggatggagagattttgaatgattagtttagggaatttgagataaagggaaatgtatgagtagagatatatttaagtaggagttagtttggttttgttggattatagagggttgttatggaagatgattatggaaatgttggttaggtgagattgggaggggtttgaatgttttttagagaagggagggaaagaggaagaggagttgtggaaaagttttttgagatggaaagtcgtgattattattgattttttttaagtggtttgggttatttatttttgttatagtttttagtgtttgaatattgtggttggttttaaatattttaaaaggaagtgaaagagaagtgatggagatttttttgaggatttggtttaagtaatgttatttttttgtgtattttagaggagaagatttgtagaagatgagtttgtaatgagaggttttttataggaaggggattttattagtgtattttgcgttttgtattttagttttttgatgtttttttgtgggattgggaaatgggttttttattgtatgtttttgacggaagaattatgttatttttgtagggattcgagttttagattaagtgtcgggttttgttgtatttttttttagtttttttaatttaggttgattttttagtttttgttgggatttgttgttaagttatttttttgggttttgtaatttacggtggtttgtgttttagattaggtttttgttaatggtgttaatttttagcgtagggagtggagaaggtgttgtttacgttaagatattaatgataggtcgagtgtggtgatttatgtttgtaattttagcgttttggaaggttaaggagggaggattgtttgagtttaagagtttaagattagtttgggtaatatagtaagatttttttttttataaaaaaattaaaaaagaattagtcgggcgtggtggtatatgtttgtagttttagttatttaggaggttggggttagagggttgtttgagtttaggagtttaaggttatagtaagttatgattatattattgtattttagtttgggtgatagaataagattttgtttttattttatgttattttttaaatttttttttttttttaatgacggagttttgttttgttgtttagattggagtgtagtggcgcgatttcggtttattgtaacgttcgttttttggatttaagtaattttgttttagttttttaaatagttaggattatcggcgtgcgttatgtttggttaatttttgtatttttagtagagataggttttattatattggttaggttggttttaaatttttgattttaggtgatttgtttatttcggttttttaaagtgttgggattacgggtatgagttattatgtttggtttttgtttttattttatttatttatttatttatttatttatttatttatttatttttttgagacggagttttatttttgttgtttaggttggagtgtaatggtgggatttcggtttattgtaatttttgtttttcgggtttaagcgatttttttgttttagttttttgagtagttgggattataggtatgcgttattatgttcgattaattttgtatttttagtagagacggggtttttttatgttggttaggttggtttagaatttttgattttaggtgatcgatttgttttagttttttaaagtgttgggattataggtgtgagttatcgtatttggttttttgtttgtatttttaaaaaaaagatatttatgataattaaggggagaggtaaggttatagtgatgtgttttgggttaaagattgttgagtttggattattggagaggggaggaaaagatggaggtgtggggttaaggggagaggttgtagaggataggatagtgtgtggttaaggttgttgtttgtttttttattattttggttaggttgaggtttaggtagtgttttttgacggagttgtttttttgtatacgaggagtttgaaatatggaaaagtaagtcgggtttttgatgtttttgtttgttgattgagattataaggttatttttgaatttttatagttttttggaattttggtttaaagaattttagtagttaagtattaatagaggttggtattttataaattgatcgtgttttttaaacgtaatattaggacggttagggtttatagggttatgggttagtagttttgtaaagaataagttttattttttttttttaaggagattgatttttattagaagagtttttttaattgtgggttgggaggtgtagttgtttttttttttttagggggcgttgtagtttagtattggggttgaggttgttttgggaataaaggtaggttgggtttggttaaatagtttttagataaacgtttaattagtttagtggatgttattgttggtaaagtttgttttgttatttgagtttttaaatggaattttattgttttttttgtacgaggttgtattattgaagttatttattattttaaggagagtatattttttaaaataaattaggatttattagttttttagttttatttgggtgaacgtttttattttttgagtggaataaaaatttttttttttaatggagtggttgtagatagttacgttgatgtatatggagtaggtagaggattgttgtagtatgttgatttttataattttgggttttgcggatttttttttggtaggacgtggatttgagttgttttgttaggattagatatggatttgtatttagttttatttatttttttatttatttagaggtatatattttataggtaagatgagtgtttggggtttaggtatgagttagggttatggaataacgtagtgtttttgggttagtaggaggttttagtttatttttttattggttttagtttttttaatgtttggtatatgagttttggtttagagtgtaaggaagattgtaaagggaaatgatagagaagagtattgaaggttattttttgttgggatgtatgaatagtttttgagttttaaagcgttttttgtaaaaatgtgtattatgtgtatgtatgtaggcgatagtaattataaataggaaggatattaatttgaatatatttaggatgtatattttgtagttttttttttatttatttcgttaattttgtagtgatttagtttcgtgatatatttttttagttaggttagggggttttggtttaggtttttttttttttggtgaaacggtagaagatttatttttatgatttgttatgtggtgttttagtgattttcggtaataacggttttatttggatttatttaatatttgagtataaagaagaggaagtagggggttttattgtaaatttggaggtgagtaaatattgtggttatttttagtgggatggagggggtttagtttttgttgtgtttttgtggttagtgaagttggttgtttttagttatgttattggtgtaggttgagttattttgattttttattacggtatgtttatgaagtttatattatttttttttttaaggagatgaatttagtgaatggtttggtgtttgttggtggaggtggtaaagttgtagggtaatagtcgaagagttagtgaagaagttattttttttttgtttttttgtttgtttgtttgttttgttttgttttgttttgagacggagttttgttttgtcgtttaggttggagtgtagtggtgttatttcggtttattgtaagttttattttttgggtttaagtgatttttttgttttagttttttgagtagttgggattataggtgtgttttattatgttttgttaatttatttatttttagtagagatggggttttattatgttggttaggttggttttgaatttttgattttgtgatttatttatttcggttttttaaagtgttgggattatagatatgagatattgtattttgttttattttttttaattttttttggaattagttgtttggttgatttggagttttagggtgatattgtttgagttataaatgatttatttgtgaatttttgtggttggttacgtattttggttttgtttgtatttttttttttttttttgtgtttttttatagtttgttttttttgttgatcgagaggtgatatttcggtttcggaattgtattatttcgttggtaatttagaggatgatgttgtatgatattagtattttgtattgttatgaagtattttttttatattaggtattttttttagggttttttttttttttattgatttgtgagttgttttgttgtttgtttagagataatatgtatatttttttaatatttttttaatattcgttagtatgaattggtttgaaatagttttaatgagtgtttggtagatttttttttaagaaatttgtaatatttttaatgtttagtgttagtttaaggattttggggtaggaggtgttaggtgggattagtttatgagagtaatttttggattatattttattttttttaaattttagttagtttttggatgaatgttagaataatatttttgtttttgtcgattatattttagagtattttgttgatttattaggttgtttttagtagattatattttgtaacgtttagtttttgagatatgaaaggaatatagaaagtttatgttaacggtttgatttatgtttggattggtttggtggtttgtttatggttggttttttttttgaataaatgtttttttttttttttagattaaagatattttaaagttagaaataatggaggagattgtgatggaaatacgttagaggtttttggaataggagggataaggaggtgttttagaagtacgggattgtggattttgtaggagtgaagattgtgatgtgtggtttttatatgtggtttagtaaagattcgagagattatttttttgtttgtattgacggttttgtgacggtttttagtttataggtttgtttttttttgttttaatattaagtttgggtggtagatgaatagtgtttttttgggttgttagttgagtttcggtattagggaatagttttagtttttttaaagtgtatagtgttatagtcgaatgggtttttattttggaataatatggagaattttttgttttttatttattgttatttataaggtatagtgttttatgaaattgttttaatagaaaatatggtatttttgatttttaaatggtttgttttggtttttatttttatattttttaaatgattgagaatgtagttggtaaagttggaagaataaagttaattaagtaggttaggtacggtggtttacgtttataattttagtatttagggaggttaaggcgggtagattatttgaggttaatagttcgagattagtttggttaataaggtgaaattttatttttattaaaaatataaaaaattagttaggtgtggtggtgtgtatttgtagttttagttatttgggaggttgaggtgggagaattatttgaatttgggaggcggaggttgtagtgagttgaaatcgcgtattatattttagtttgggtgatagagcgagattgtgttttaaagaaaaaaaaaaataagtagttttttgtttggttggaatttgattttttgttgcgtgttttttgtagttatagatgtgattatgtttatatcgggttgttttaatttgttttgtttggagagtgatttgtaagatgttgaattatttatgataatatagtgaatgttttgggtttatgtatttagataaatatgaagaaaataagtaaagaaaaatggagattgggaaagtaaagttgtttttattttataattgaagtagtgtggagtattaatttgtggatgatttagagttaaaagataaaaagacgttagagttttcgttgaagaatgtgagaatttttgtgtattgttttttttgatgattatttaaaaatggtgttttgatgtaggtttgggggaatatttttaaaaataagggtgttatgtgtttgtaatttagtattttgggaagttgagtgggtagattatttgaggttaggagtttaagattagttcggttaatatagtgaaatttcgtttttattaaaaatataaaaattagtcgggtgtggtggtataagtttgtatgtagttagttatttaggaggttgaggtatgagaatcgtttgaattcgggaggcggagttgtagtgagttgagatcgtattattgtattttagtttaggtgatatagtgagattgtttcgaaagaaaaaaaggaaaagaaaaggcggtcggacgtggtggtttatgtttgtaattttagtattttgggaggttgaggtgggtggattataaggttagatcgagattattttggttaatatggtgaaatttcgtttttattaaaaatatagaaaaaataaattatagtttggtatggtggttggtatttgtagtttttattatttgggaggttgaggtaggaaaatgacgtgaattcgggaggtggagtttgtagtgagttgagatcgtgttattgtattttagtttgggtgatagagtgagattgttttaaaaaaaaaaaaaaaaagggatattatatgtaagcgttgtttttatatatgtggtaaatttgtttgtttgtttttgagatagagtgtcgttgtgtcgttaggttggagtgtagtggttcgatttcggtttattgtaatttttattttttgggtttaagtaattttgttttagttttttaagtagttgggattataggtatgcgttaatacgtttagttaatttttgtgtttttagtggagatcgttttattatgttgattaggttggtttcgattttttgattttgtgatttattcgtttcggttttttaaagtgtttggattataggtatgaattattgtatttagttatattttttgatatttatagacgttttttttttttttgtttttttgagacggagttttgttttgttattaggttggagtgtagtggcgcgatttcggtttattgtaattttcgttttttgggtttaagcgatttttttgtttaagtttttcgagtagttgggattataggtacgtgttattacgtttaattaatttttgtatttttagtagaggtggtattttattatgttggttaggatggttttgattttttgattttgtgattttttcgttttagtttgttaaagtgttgggattataggcgtgagttattgagtttagttatagatgttttaatattattgttttttgtttttttgtttcgggtaataataaggagttgaggatagttgaggaagggtttggttgataaaatgtttttcgatagagttttaattattttacgtaaatttaggatagttttaatggtagtaattttgaatattgtatttgataatttttaaatataatttggtttttttttattaaatggtatgtttttttataataatataataaataattttttattttattttttttttttgagatagggttttattttgttatttaggttggagtggggtggtatggattatagattattggagtttttattttttaggtttaagtgaatttattttagtttttcgagtagttgggtttataggtatgtgacgtattattatgtttggtttttttttttttttttttttttgagatagggttttgttttgttatttaggttggattgtagtggtataattacgttttaattttttggttttaattagtttttaattttagttttttgagtagttgggattataggtgttgagttattatatttagttaattgtttttgttttttgtttttcggtagagatgaagttttattatgttgtttaggttggttttgaatttttgattttaagtaatttttttgtttaagttatttttttattttagttttttagagtgttgagattataggtatgagttattatacgttgtttattttttttatttttacgaatttttttgttgttgtttaggtttaagcgatttatttatttttgttttttaaagtgttgggattatgtgtgtgagttatagtttttggtttttttttttgttttttttattttaagttgtattattagttttggggagtttgtagataattgaatattttataggttgtgttgtagttttagatggatcgatttgttatgtttttgaggttatttaggttgtatatttttggagagaagggaatggtaaagagtgggagtttgagttaagtttggttttgtttttttaagagataaggtttttgtaatttaggttgtagtatattggtatgattatggtttattatagatttgggtttagttaatttttttgttttagttttttgagtagttgggtttggttttttttagggttatatgttagtttatttattttttttatttggtgttttttagtttgttagtttatgttgtttatttagtatttgttgaatggtgattatttattaagtggaattaatataaaattgtttatttaaaagtaattattggtgattatttttttgtagtggtttattagagggcgttattgttaagtgtaattttagtaggtgttttgtgttttttttttttaatggaataaattgaaatttttatatggtattgaatttttttagtaatttggggggttgttttaattgaattatttttaatgaagatatatgaatttgaagggatttatttaatatatgataatattatttaatattatttttttttttttttttttttgagataaagtttcgttttattttttaggttggagtatagtgacgggatgttagtttattgtaattttcgtttttcgggtttacgtgatatttttgttttagttttttgtatagttgggattataggtatttattattacgtttagttaatttttttgtttgtttgtttgtttgtttttttgagacggagttttattgttatttaggttggagtgtagtggcgtaattttggtttattgtaatttttatttttcgggtttaagcgatttttttgttttagttttttgagtagttggaattataggtacgtgttattatgtttagttaattttgtgtatgtttagtagagacgaggttttattgtgttaattaggatggtttttattttttgatttcgtgatttgttcgttttagttttttaaagtgttgggattataggaatgagttattgcgtttagttgaatttttatatttttagtagagatggggtttcgttatgttggttagtttgtttttgaatttttgaatttaggtgatttgtttgttttggttttttgaagtgttgggattataggtgtgagttattatatttagttaagtaatatttattttcgattgttaggtatttgttaggttttggattttagtttttaagtttttaatagtattatttagggtttatgtttttaggattttttgagattgtgtttcggtttttaaaaaaagtattattttatagtattatataggtatttttaaagtatagtgtattggtcgggtgcggtggtttatatttgtaattttagtattgtgggaggttgaggcgggcggattatttgaggtcgggagtttgagattagtttggttaatatggggaaattttatttttattaaagatataaaatgagttgggcgtggtggtgggtgtttgtaattttttaggaggttgaggtaggtgaatcgtttgaattcgggaggtggaggttgtaatgattcgggatcgtgttattgtattttagtcggggtgatagagtgagattttgtttttaaaaaaaaaaaaaaaaaaaaaatatagtgtatttttagaaaaaaatattagagtttgggtattgggtatggggtttatttaaaataagaaaatggtaaagtggaaaattagggataaggttttagattaggtgtagttgatttttgttgtgatttttaggaagtatagttttaatttttgtggaaaattaaatgagatttagtttgatttttatgaattttgtttttataaaataataataataaaaaaacgtaggtgtggtggtatgtttttgtagttttagttatttgggaggttgaggttagaggattattagaatttagaaagtcgaggttgtagtgagttgagattgtgttagtgtattttagtttggttaatagagtaaggttttgtttttaaataaataaattaaattaaataaaaaatttaaaatttttgtaaagtaagttatgatttttatttacgggtgaagaaatgaatttagaattaaagggatttgatgaagtttttttgaattgtgaattaatgtagatttaagttttagggaggtgttataatgtagttttttagaggatggattggattgattgaaagtttatggatttagaaatttaattttagtattgaggttgattttttgtttggattgttattttgtttattgtttatttttttatgtaggttttatgaggataagggtgggtttttttttttattattgtgttttagtatttaaagtagtgttttatatatagatgtttaataaatgttttttaagtgaattgttatttattttttgagatatggtttttgttttttagattggagggtagtggcgtaattttagtttattgtattttttgttttttagatttaagtaatttttttgttttagttttttaagtagttgggattataggtatatgttattacgttcggttaatttttgtatttttagtagtgaggggttttattatgttggttaggttggttttaaaattcgtgattttaagtgatttatttgtttcggttttttaaagttttgggattataagtgtgagttatcgtattcggttatgaattgttagtttaaaaaaatgtgtattaggggttttgatttgattgtttaattttaagttaaattagagaataaagtatgtgcgcggtggtttatatttgtaatgttagtattttgggaggttgaggtgggtggattacgaagttaggagatcgagattattttggttaatacggtgaaattttgtttttattaaatatgtaaaaaaaattagttaggtatggtggcgggtttttgtagttttagttattttagaggttgaggtaggagaatggcgtgaattcgggaggcggagtttgtagtgagttgagattgtattattgtattttagtttgggcgattgagcgagatttcgttttaaaaaaaaaaaaaagaatttggagaaaatgattaaagtatgaatgggaataaaaagaaagtataatttttagaaggaataattaggatataattaggataagataatgggtaaataggttaagtataatggtttatgtttgtaatattaatattttgggaggttaagagggcggattatttgaggtcgggagtttgagattagtttggttaatatggtgaaattttatttttataaaaatatagaaattagttaggtgtgtggtatgtgtttgtaattttagttatttgggaggtaggagaatcgttttagtttgggtggtggaggttgtaatgagtagagatcgtgttattgtattttagtttgggtaatagagtaagattgttttaaaataaataagtaaataataaataatgggtaaataaagtagaataagggtatttatagttgaagaatgatattatagattagaattaagattgttagttagataattttgtgagagaataaagttaaattaaattatatttgaatttataaattttagttttaaatttacgtataattttttatgttttttatttcgtattttttaagtaattaattttttttgaaattagtattaaaaataagtgttattttttaatgcgatagaaatatttttaaaatatttaatataatagttgaatgtataatatttatcgtgtagttgttttttcgatattagtagtaatttgtgaaaaattagtggttttagattaataggtttttgatattgaatggtatagtgggaattatgggttttggagtaaggttagtttgggatgaaattgtgattttgttatatattggttaagtgattttgggtaggtaagttatatttttgtttttttatttgtattatggggaatagtattatatgttttattgggttatagtgaggattatatgagataatgtagtttatggaaagtgtaaatagtgttcggtgtaaagtaggagttgtgataagtggatttttttttagaaatgggatttcgggttaggagtagtggtttacgtttgtaattttattattttgggaggttaaggtgggtggatcgtttgaggttaggagttcgagattagtttggttaatatggtgaaattttgtttttattaaaaatataaaaattaggtacgtgtgatggtgtatgtttgtaattttagttattcgggaggttgaggtaggagaatcgtttgaattcgggaggtgaaggttgtagtgagttgaaattttgttattgtatcgtagtttgggcgataagagtaaaattttatttgaaaaaaaaaaaaaggaaagaaagaaggaaagagaaggaaagaaagaaggaaagagaaaggaaggaaagaaagaaagaggaaaaaaggaaaggaaaaggaaaaagaaaagaaagaaaaggaaggaaagggagaaatgggatgtttgttaggtgtagcgttttggggaggcgtggagagtttataatagggattaaggtgttttttagtcgtagaatatggattatttgttaggtgtggttttggtatatttaggttattggttttgtcgatttgttaaatttaattatttgggtattttttcggttaatatagaggatgtttttatgtgaatacgtgtttatttgtgaaatgtttataatgttaaaggttcgttttggggtaaatatttgatagcgtttggtaaatttaataaatgttttttttgtaatgagtaagttttttaatgtttaaagaaatagttgaattcgttagtaatatgtcggatgttttttttatgtttgtatattttttcgttagtttttttttttttttttttttgagacggagtttcgtttttgttgtttaggttagagtgtaatggtgttatttcgttttatcgtaatttttatttttcgggtttaagcgagttttttgttttaacgttttgagtagttgggattataggtatgtgttattacgtttggttaattttgtatttttagtagagacggggtttttttatgttggttaggttggtttcgaattttcgattttaggtgattcgttcgtttcggttttttaaagtgttgggattatcggcgtgagttatcgcgttcggttcgttagttttaatatttatgttttttggagggtgaagggtttgaaaggtattaaaaattttggtttttaggagcgagttaaatttttttttttagagattgaaggaggttattcgatttcgtttttaggaaaatttaattcgtaatttttttttcgttttggtttttttaggttttattattcgcgtcggggagacgcggttcggtttacgttaggtcggtaagaatttattaggttttaggagggcggggtcgagttttagaagtcggggttcgggttaggagttttggtgtaggcggattcgggcgcgtgttatgggattataattttcggtacgtatcgcggattgcgtcgaatacggttggttgggagatttaattttattgtttttatcggttaatgggacggaggaaagaggtttgattcggattttcggaggttaatggtaatatagaggaggcgggtgtttttttattatttattttgcgtttagagaagttatatttaaaaggtcgtgtcgggtcgggttttcgtaggtagtgggattagagtcgggaggggcggcggtgtttcgggaaagcggtttttggggtattcgggttttttcgaggcgggtttcggacgtcgtcgtgggcggggtcgagggcggggtttggtttcgttgtggagcggttcgtaatttattatggcggtcgcggggtttggtgtttgtgtttgagtagcgttggagtcggagtcggttttcgggttttgcggttgaggagttttttcgttgtttacggtttttatcggcggggggcggttgggtttttcggcggagttcgggagatgtgattgtttgagggcggtggtggtgttagcgttcggggtcgggggagggggtgtttcgggtagagattttcgggtttggggtagttgaggcggtcgggttttttttatacggggttcgtttttcgttgtttgggtcgcgagagtttttcgttttttatagtttcgtttcggttttgggatattgcgggtggtttgttttttttagtttgggatatttcgttttttgaggcgtggaagagcgtcgtttcggagtaagttgttcgtgtcgcgtttcgatagttttttttagttttaagtcgttttttatttcggatttcggttttaattttggttacggagttttttatttaaattttttttttgttgttaaggggttttttttttttttaaggtggttttcgcgagtttttaatgttttgattttttttaatgttatttacggtttttttagttttagtttagttaaaaattttaatgtaaaggaaaagtttggattggttttataggttttttaaaaagcggatttaaaagttgttggtaatgtattttttttcgttagagtcgagggtaaattcgttgaaatttgggtgattcgtgttttttttcggagagtaaagtagagaagcgagagcggttattagttcggtaggaaatttgttggaagatgaagaagttaagatagggggttggtgatttttataggaaaagttttggaggagtagttaaagattattagcgttttttttatgtgtgagaattgaaatgattagtattattgattttttttagtattttttgtgaatatttttgtttaggtttttttttttgaaaagaaattgttatttagttcgtttaaaataaattaagaaatttttgggtaatattgtaattatatgaaattgataatcgcgaaaataattggaatttttgtttgtaagtgttaatttaaaaaaagtgtttttttttgttatggaagatgtttttttgtgattgattttaattgttgatttgtggagatgtagcgaatgtgaaattttacgtatatgttatttttttttacgttcgttgatcgttttggaagattttgaatttttttttggaaaggggtatttattattattttatggggtagtagtttggaaaagtatttggggattaaagaaggttaagtttgtttgttttgtattttattaaaggagtagggaagaaggaattatcgaggtatgggggtttatattgtaatgtttttgtggaatatggtgagtgttttttaaaatttttgtttatggttttttttatgtatttattttaggtttttaaggaattttgaataatagtatttgcgatagttttttttaattttatttaataaatttgttattgtagttattttttagtggaattttttttgtataagaaaaagttatttcgtgatttcggttttatttaaaatttatttgagttgtttattttttgtttgatttttttgttaatttattgttgattttggataagttattttattgttttagggttttagttttttgaggggttggattttagtggttttttagggtttttggttttatgattttgttttaatcgaagtcgtgggtttttttgataagtatggattttttattgttttgtttatagagagtttttattatatttttaaagtggtttgtgtttttgagaaagttaagaattatagatattggttgacgttaatatttttgattttttttttcgtaagtaggatttgaaaatatttattttggagttatgtgggaaaaattaagtggggaagtagtattttttgtgaattttagatagatagtttttgttttattttttataaggagtaatttttttttcgttgatgaagtttttattttgttttttttttgtttagaatgatatttgggttaataaaggttatttgtgatatttttatgaatatatttggtatttgaatgttgttcgtatattttatgttgtttatgtttagtaattttgtgcgaagttaaagttaagggtcggtttatattgatgtttataattagttaattagggttattgtttgtattgttgtagtttgatattttttggattgtgttttttatattaaaaaattagttgagtttatttattttataagtaaacgtatgaagtgtgttagtggtttatattttgaaatttatttagaaatattttaatattgggtgattgtagttaataaaggtttttgttggatgaatttgtatttgatagttgaagttttatttttttacgggaaaatatttattttatttaaataaattcgggtgtttggattttattttgttttgaaatattagttttattttagttttgtttttaggtaggtaaatatggtaatgtgttgttatgatggtttttaaatttaggatttaaaaagtgaattatttatattttaattagtgatgattatgtattttatatagtgaaaattggaatagattttttggagagttttggcggaatttattagaatttgaaatgtacgtgttaatgatttagtaattttattttgggaagttagtagagaaagtagtgtagttttttgtgtgtttttgatatttttttaggggttgagaggttaaaattatttttttgttaatagagtattaaggttttgttttttttgttgtgttgacgtttgtagtaatggtataaaagtaaagtaggtgttttagtatgatttagggttgtggtatttaattatatttgtagttattgtattttttatgacgtgtatttatagttaaataaattaaatatatatatatatatatatatatatatatatatatttattttttattgaaaaatgttttttttttttttttttttttttttgagttagagtttttgtgtgttatttaggttggagtgtaggagtgtagtgtggcgatttcggtttattgtaatttttgttttttgggtttaagcgatttttttgttttagttttttaagtaggtgggattataggtacgcgttattgacgttcggttaatttttgtattttttagtagagacggggtttcgttatgttggttaggttggttttgaatttttgattttaggtgatttatttattttggttttttaaagtgttgggattataggagtgagttattgcgtttggttagtttttattggataatattttgatgaagtagtaaaaattattaattttattatattttgatttttgtgtatgtttttttaatattttgtgggttaaaaaggggggtatgtattaagtatttttgtatagtaaagtataatgattatttttaggaaaagtattttcgtggttgggttgtaaattgaattagttattttttttatggattgttatttttatttgaaattatgataaattatggttatttagattaaaaagtgtatgaaggaattttttaaagaaaataataggtagtatttgttgttaatgatgaaattttagttttttagtgaaaattaggattttggagaattttttttttttttttttcggggtagagtttcgtttttgtcgttcgggttggagtgttgtggtgtaatttcggtttattgtaatttttgtttttcgggtttaagcgatttttttgttttagttttttaagtagttgggattataggtgtgtattattatgtttggttaatggagaatttttatttgtttttgtgatatagagattggtggtaatatttatagatgttatattttaatattttataatgaaatgtattatttggaagatttatataaattagtaaattaatatttttttttttgtttgtttttgcgatagagttttgttgtgttgtttaggttggagtgtagtggtatgatttcggtttattataatttttattttttaggtttaagtaattttcgtgttttagttttttgagtagttgggattataggtatgtattattataagtgaataatttttgtatttttagtagagatggagttttattatgttagttaggttggttttgaatttttgattttaaatgatttggttattttagttttttaaaatgttgggattataggtgtgagttatcgtgtttagttaaattattattttttaaatgattaatgtatgatataaaattatgtataggttaaagatttatttaaagtgtaaaatggaggttaggtgttgtggttcgtgtttgtaattttagtattttgggaggtcgaggtaggtggattatttgaggttaggagttcgaatttagttgtgtaatttagtgagattttatttttatagaaatttaaaaaattagttaagtttttattggagttaaagagtcgaggttgcggtgagttatgaatatagtattgtattttaatttgggtaatagagggagatcgtgtttttcgggggtaaaaaaaaaaaaaaatatagtttattggtagagttttttaaaggtagttagtttttaagaaatttttggttaggtcgggtatagtggtttacgtttgtaattttagtattttgggaggtcgaagtgggtagattatttgaggtcgggagtttaggattagtttgattaatatggagaaattttgtttttattaaaagtaaaaaattagtcgggcgtggtggtatatgtttttaattttagttatttaggaggttgaggtaggagaattgtttgaatttcggagcggaggttgtattgagacgagattatattattgtattttagtttgggtaataagagcgaaatttttgttttaaaaaaaaaaaaagaaatttttggttgggtgtggtggtttacgtttgtaattttagtattttgggaggatgaggtaggcggattatttgaggttagtagttcgaaattggtttggttaacgtgatgaaatttcgtttgtattaaaaatataaaaattagatgggcgtggtggtatgtatttgtaattttagttatttaggaggttgaggtaggagaatattttgagtttcgggggaagaggttgtagtgatttgagatcgtattattgtattttagtttgggtaatagaatgagattttgttttaaaaaaaaaaaaaaaaaaaagaaattattatttattatgttttgatgtagtattaaagaataatatttacggttatttagaaagtttgttttggggggagaaaatagttattttttagtaataaaaatatttgtttttaaatgaataattatgtttttaaattttagtatttatttttaatgtggtaattattgatgagataatttatataaattaagttttttaggggtttttagttattttttaagagtgtgataagggtttgagattaaaaagtttgaggttaggtattgtggtttatgtttgtaattttatattttgggaggttaaaggcgggtggattgtttgagtttaggagtttaagattattttgggtaatataagaagattttgtttttataataagaataaaagaaattagttagacgtgttattatatttgtgtttttagttatttgagtggttgaggtgggagggttatttgagttcgggaggttaatgttgtagtgagttatgattacgttattgtattgtagtttgggtaatagagtaagattttattttaaaataaagtttgagaattgttgttatggaaagtttattaagaaggtatatagggatgttttttgttgaagtattaatattgaatgatgtttgtgttgtggtgagtagaaaaaaagtaatttgaaaattattatttatggtatggttttatttttgtaaaataaaaatatttgtttatttgtgtatgtttaggaaaaaaaagtatggaaggattttatatcgaaatttttatttttagggatttggagttttaggtggaatcggagaaaattttttttttttggtttgtgtgatgttttaagtgtttttttataataaatttgggttattttataatacgaaaaattcgaagatttaaaaattgaggttaggtacggtggtttatgtttataattttagtattttgggaggttgatatatgtggattatttgaggttaggagtttgagattagtttgattaagaaggtaaaattttgtttttattaaaaatataaaaattagttgggcgtggttgtaggtgtttgtagttttagttattcgggaggttgagataggagagttgtttagatttaggaggtcgaggttgtaacgagttgagattgtacgttattgtatttttagtttgggtgacggagtgagattttattttaaaataaataaataaataaaaataaaaattgaattgatgatagtttaatttgttattttttttagatttttttttatgaaagaatttgtttaagttgtgtttgaagataaattaattattttggattttgggtattttttttttaagggaatattatgttattttgtgttatagattgtttgcgattttttatagtttgatttttttagagttggttaatatttatgtaggttagattgaaaaatttgaatttagaaatgtacggtgttggagtagatatggatttggaagttaagaatagcgttggtgttgttgttgatggtgaatttgaaagagtgggtagatggtaattttttgttagaattatttagggttaaagggttagttatatttataagggaaaagaggaaattatgttattaaatattttatgtattatatgttttttttaaattttagtggtttgattaagaaaatttatttttgggagagttggtataataattgaaagtatttagtagttaattttttttttagtgtttttttttttttttaataaatatttattttattgagtatagattatgataggtcgtgttgtagttattgatgatatatttgtaaataaaataatttttgtttttttagaatttatattttagtgggaggagatatattataaataagttaagtaaataaaatatagatatgttagtgatatgtgttgaggagaagaataatatagagaaggggatagggaatggggtaggaggtgtaattttagttagggtggttagagaggtttgattgagagggcggtatttgattaaagattcgaaggaggaagatgagtagtaggttttgttgaaatatgtgaaagaattttaggtcgagggaattaggatgtagaaatttgaggtagagtttgttagttttaaggagtagtttagaggttattgtattagagtaaagagtaaaaggagagatgtaggaggtaaaatggagggtgggaagagaatggttgaaggagagggtggttttattggtttattttaaggattttgattttgatttatatgatgtgggaaggttttggagaatttttcgaggggattatattatttgatgtatgttttagtatgaaatagaatttttttggttgttatgatttgaaggaggataagggagtagggattttacgggggtattgattgtatagagttaggtaagagtgatgatgtttggattaaagtggtggtattgggtggagggttagaatcgataagatttgttttcggattagatgtgggatatgggggtgtgagaggggttaagtgtgatttttaggttttcgaattgaataattggaagaatagagttgttttttattgaaatgaaggtcgaggttgtagtggtaagttgtgattgcgttattgtattttagtttgggtaatagagtaagattttgttttaaaaaaaaaaaaatatttattattaggtaaaattatttatggtttttaaaattttatttaaaataatagatatttgataaattaatattgtaggtcgggcgttgtgatttacgtttgttattttagtattttaggaggttaaggcgggcggatt

SEQ ID NO: 98 - DNA, 35962 bp, Artificial Sequence
  chemically treated genomic DNA (Homo sapiens)
gattcgttcgttttggttttttaaagtgttgggatgataggcgtgagttatagcgttcggtttatagtgttgatttattaagtgtttattattttaaataaagttttgagaattataagtggttttatttgatggtaaatatttttttttttttgagatagggttttgttttgttgtttaggttggagtgtagtggcgtaattatagtttattattgtagtttcgatttttattttaataaaaggtaattttatttttttagttatttagttcgaaaatttgagagttatatttggttttttttatatttttatattttatatttaattcgagagtaaattttgtcggttttgattttttatttagtgttattattttggtttaagtattattatttttatttggttttgtgtaattaatgttttcgtggaatttttgtttttttgtttttttttagattatagtagttagagagattttattttatattgaaatatatattagatagtatagttttttcggaaaattttttaaggtttttttatattatatgaattaaagttaaaatttttgaaatgggttaataaggttatttttttttttagttattttttttttattttttattttattttttgtatttttttttttgttttttgttttggtgtagtggtttttaggttgttttttgaaattagtaagttttgttttaggtttttgtattttggttttttcggtttgaaatttttttatatattttaatagggtttgttgtttatttttttttttcgggtttttaattaaatgtcgtttttttagttaggtttttttagttattttaattaaaattatattttttattttattttttgtttttttttttatgttatttttttttttagtatatattattaatatatttgtattttatttatttagtttatttatgatgtgtttttttttattagaatgtaagttttaggagggtagggattgttttgtttataaatatattattagtgattataatacgatttgttatagtttgtgtttaataaaataaatgtttgttgaaggaagaaggaaatattaaggaaaaagttgattattaagtgtttttaattgttgtattaatttttttaaaagtgaatttttttagttaagttattgaaatttgaaaggaatatatggtgtatgaaatatttaataatatggttttttttttttttttgtaaatatgattagttttttgattttgaatgattttggtaaaaagttgttatttgtttatttttttagatttattattaataataatattaacgttatttttggtttttagatttatgtttgttttaatatcgtatatttttgaatttaagttttttaatttaatttatatggatattaattaattttagaaagattaggttatgaaagatcgtaaataatttgtaatataaaataatatggtatttttttagaaaaagaatatttagggtttaaagtaattggtttgtttttagatataatttaagtaaatttttttataaaaagggatttgaaaaaagtgataggttgggttgttattaatttagtttttatttttatttatttatttattttgagatggagttttatttcgttatttaggttgggagtgtagtggcgtgtaattttagttcgttgtaatttcgattttttgggtttaagtaatttttttgttttagtttttcgagtagttgggattataggtatttgtaattacgtttagttaatttttgtatttttagtagagatagggttttatttttttggttaagttggttttaaatttttgattttaggtgatttatatgtgttaattttttaaagtgttgggattataggtatgagttatcgtgtttggttttagtttttaaattttcgaatttttcgtattataagataatttaagtttgttgtaaaaagatatttggaatattatataaattaaaaagagaaagtttttttcgattttatttaaagttttaagtttttagagataaaaatttcggtgtaaaatttttttatattttttttttttggatatatataaataaatagatatttttgttttataaaaatggggttatattataaataatgatttttaaattgttttttttttatttattataatatagatattatttagtgttagtattttagtaagaaatatttttatgtgtttttttgatagattttttatagtaatagtttttaaattttgttttgagatggggttttgttttgttatttaggttgtagtgtagtggcgtgattatggtttattgtagtattggtttttcgagtttaagtgatttttttattttagttatttaagtagttgggaatataggtgtgataatacgtttggttaattttttttgtttttgttgtagagatagggtttttttatgttgtttaggatgattttgaatttttgggtttaagtaatttattcgtttttggttttttaaagtgtgaaattataggtataagttatagtgtttggttttaaattttttaattttaggtttttgttatatttttgaaaaataattgaaggtttttaagaggtttagtttgtgtaggttattttattaatagttattatattagaaatgaatattgaaatttaaaaatataattatttatttaaaaataaatatttttattattggaaaataattgttttttttttttaaaatagattttttagataatcgtagatattgttttttgatgttatattaaaatatggtaaatggtagttttttttttttttttttttttttgagatagagttttattttgttatttaggttgaagtgtagtggtgcgattttaggttattgtaattttttttttcggggtttaagatatttttttgttttagttttttgagtagttgagattataggtgtatgttattacgtttatttaatttttgtatttttagtatagacggggttttattacgttggttaggttagtttcgaattattgattttaagtgattcgtttgttttatttttttaaagtgttgggattataggcgtgagttattatatttagttaggaatttttttttttttttttgagataagagtttcgtttttgttgtttaggttggagtgtaatggtgtgatttcgttttaatgtaattttcgtttcggggtttaagtaatttttttgttttagttttttgagtagttgggattagaggtatgtgttattacgttcggttaattttttatttttggtagagatagggtttttttatgttagttaggttggttttgaattttcgattttaggtgatttgtttatttcggttttttaaagtgttgggattataggcgtgagttattgtgttcggtttagttaggaattttttaaaggttggttgtttttaagaaattttattaatgaattgtatttttttttttttttattttcgagagatacggtttttttttattgtttaaattggaatgtagtgttgtgtttatggtttatcgtagtttcgattttttggttttagtgggagtttggttaattttttaaatttttgtagaggtaagattttattagattgtatagttgggttcgaatttttgattttaggtgatttatttgtttcggttttttaaagtgttgggattataagtacgagttatagtatttggtttttattttgtattttgaatggatttttaatttgtgtatgattttatattatgtattgattatttagaaaataatggtttggttgggtacggtggtttatatttgtaattttagtattttgggaggttgaggtggttagattatttgaagttaggagtttaagattagtttggttaatatggtgaaattttatttttattaaaaatataaaaattatttatttgtggtggtgtatgtttgtaattttagttatttaggaggttgaggtacgagaattgtttaaatttgggaggtggaggttgtagtgagtcgagattatgttattatattttagtttagataatatagtaagattttgtcgtaaaaataaataaaaaagaaaatattgatttattgatttatgtagattttttaaataatatattttattataagatattaaaatatggtatttgtaaatattattattaatttttatattatagaggtagataaaaattttttattagttaggtatggtggtgtatatttgtaattttagttatttgggaggttgaggtaggagaatcgtttgaattcgggaggtagaggttgtagtgagtcgagattgtattatagtattttagttcgggcgataagagcgaaattttatttcgaagaggaaaaaaaaaaaattttttaaaattttaatttttattggaaagttaaaattttattattggtaataaatgttatttgttgttttttttgaaagatttttttatatattttttagtttgaataattatagtttgttatagttttaagtaaaaatggtagtttatgaaaaaagtggttagtttagtttgtaatttaattacgaaagtgttttttttggagataattattatattttattgtatagaagtgtttgatgtatatttttttttttaatttatagaatattaagaagatatatataagggttaaaatgtaataaaattaataatttttgttgttttattaaggtattgtttagtgaaaattagttaggcgtagtggtttatttttgtaattttagtattttgggaggttaaggtgggtggattatttgaggttaagagtttaggattagtttggttaatatggcgaaatttcgtttttattaaaaaatataaaaattagtcgggcgttagtgacgcgtgtttgtagttttatttatttgggaggttgaggtaggagaatcgtttgaatttaggaggtagaagttatagtgagtcgagatcgttatattgtatttttgtattttagtttgggtgatatatagagattttgatttaaaaaaaaaaaaaaaaaaaaaaaggatattttttagtgaaaagtggatatatatgtgtgtgtgtgtgtgtgtatatatatatttagtttgtttaattgtgagtgtacgttatgaagaatgtaatgattataagtatagttaggtgttataattttgaattatgttaagatatttgttttatttttgtattattattgtaaacgttaatatagtaaaagagataagattttggtattttattaataagaaaatagttttagttttttaatttttgaagagatattagggatatatagggaattatattgttttttttattagttttttagaatgggattattgggttattggtacgtatattttaaattttgataagtttcgttaaagttttttaaaaagtttgttttaatttttattatgtaaggtgtatgattattattagttaaaatgtaaataatttattttttaaattttgaatttgggaattattataataatatattattatatttgtttgtttaaaaataaagttaaaatagaattaatgttttaaggtaaagtaaaatttaagtattcggatttatttagatgaagtgaatattttttcgtaagaaagtaaaattttagttgttaaatgtaagtttatttaatagaagtttttgttgattgtagttatttaatgttggggtatttttgaatgaattttaaagtataagttattggtatattttatacgtttgtttataggataggtgggtttaattgattttttaatataaaggatataatttaaaaaatgttaggttgtaatagtataaatagtaattttaattaattggttatagatattagtgtaagtcgatttttagttttaatttcgtatagaattattggatatgaataatataaaatgtacgggtagtatttaaatgttaaatatgtttataaaaatgttatagataatttttattggtttaaatattattttaaatagggagaagataggatgaaagttttattaacgaggaagagattattttttatggaaggtaagatagaagttgtttatttaaaatttataaggaatgttgtttttttatttgattttttttatatggttttaaagtgagtatttttaagttttatttacgaaggaaaaggttaaggatattagcgttaattagtatttatgatttttaatttttttaggaatataaattattttgagaatatgataaaagttttttgtagataaagtagtaaagaatttatgtttgttagaagagtttacgatttcggttagagtagaattatagaattagggattttaagaaattattgaagtttagttttttaggaaattaaagttttggaatagtaaagtggtttgtttaaggttaatagtgaattagtagaggaattaggtaagaaataagtaatttaaatagattttgaataaagtcgaagttacgaagtaatttttttttatataaagaaagttttattaagagataattatagtaataaatttattaagtggaattggaaggaattgtcgtaagtattgttgtttaaagttttttgaaggtttaagatgaatgtatgaggaaaattatgagtagaaattttgaaaagtatttattatgttttataaaaatattgtagtgtggatttttatgtttcgatgatttttttttttttgtttttttgataaaatgtagggtaggtaagtttggttttttttggtttttaagtatttttttaggttgttgttttataaagtaataataggtatttttttttagaagagggtttaagattttttagaacggttagcgagcgtagagggaaatggtatatacgtgggattttatattcgttgtatttttataagttagtaattgaagttaattatagaaagatattttttataataaaaggaagtattttttttaggttgatatttgtaagtaggagttttaattattttcgcggttattaattttatgtaattgtaatgttatttaaaagttttttgatttgttttaaacgggttgaataataatttttttttaagaagaaaaatttaaatagaaatatttataggggatgttgaaaagggttaataatgttagttattttaatttttatatataaaggaaacgttgatggtttttggttatttttttagaattttttttgtggaagttattaattttttattttagtttttttattttttaataaattttttgtcgaattagtggtcgttttcgtttttttgttttgtttttcggaaaaggatacgggttatttagattttagcgagtttgttttcgattttgacgaaaaggaatgtattgttagtaatttttaagttcgttttttaaaaggtttgtggaattaatttagattttttttttgtattaaagtttttggttgagttgagattaagggggtcgtaggtgatattggaagaagttagggtattagaggttcgcgggagttattttgggggaaggggagattttttgatagtaagggagggatttgaatgggaggtttcgtggttaaagttggggtcgggattcggaataaggggcggtttggggttgagggaagttgtcggggcgcggtacgggtagtttatttcggggcgacgtttttttacgttttagaaaacggggtgttttaagttgggggaaatagattattcgtagtgttttaaagtcggggcggggttgtaagggacgaaggattttcgcggtttagatagcggaaggcgggtttcgtgtagaggaggttcggtcgttttagttgttttaagttcgggggtttttgttcgagatattttttttttcggtttcggacgttgatattattatcgtttttaggtagttatatttttcgagtttcgtcgagggatttagtcgtttttcgtcggtaggggtcgtggatagcggaggggttttttagtcgtaggattcgggaatcggtttcggttttagcgttgtttaggtatagatattaaatttcgcggtcgttatgatggattacgagtcgttttataacgaggttaggtttcgttttcggtttcgtttacggcgacgttcggagttcgtttcgaggggattcggatgttttaagagtcgttttttcgggatatcgtcgtttttttcggttttggttttattgtttgcgaaagttcggttcggtacgattttttaaatgtggtttttttgagcgtaaggtgagtggtaaggaagtattcgttttttttgtattgttattggttttcgagaattcgggttaggtttttttttttcgttttattggtcggtgggagtagtagggttggattttttagttaatcgtgttcggcgtagttcgcggtgcgtgtcgggagttgtggttttatggtacgcgttcgagttcgtttgtattaagatttttggttcgggtttcgatttttggggttcggtttcgtttttttgggatttggtagatttttgtcggtttagcgtaggtcggatcgcgttttttcggcgcgagtagtgagatttggaagagttaaagcgagggaaaaattgcggattggatttttttggaagcggagtcggataattttttttagtttttaagggagaaaatttggttcgtttttagaaattaaggtttttgatgttttttaagttttttattttttaaaaagtataaatattagaattagcgggtcgggcgcggtggtttacgtcggtaattttagtattttgggaggtcgagacgggcggattatttgaggtcgggagttcgagattagtttgattaatatggagaaatttcgtttttattaaaaatataaaattagttaagcgtggtggtatatgtttgtaattttagttatttaggacgttgaggtaggagattcgtttgaattcgggaggtagaggttgcggtgaggcgagatggtattattgtattttagtttgggtaataagagcgaaatttcgttttaaaaagaaaaaaaaaaaaaaattagcgaagaaatatatagatatagggaaaatattcgatatgttgttaacgaatttaattgtttttttgggtattaggaggtttatttattatagaaaaggtatttgttgggtttgttaggcgttattagatgtttgttttagaacgaatttttaatattataaatattttataggtggatacgtgtttatatgaaaatattttttatattagtcgagaaaatgtttagatggttgggtttagtaagtcggtagaattaatgatttagatgtgttaaagttatatttaataaataatttatgttttgcgattaaaaagtattttggtttttattataggttttttacgtttttttagagcgttgtatttgataggtattttatttttttttttttttttttttttttttttttttttttttttttttttttttttttttttttttttttttttttttttttttttttttttttttttttttttttttttttttttttttttttttttttttttttttagatggagttttgtttttgtcgtttaggttgcgatgtagtaataggattttagtttattgtaatttttatttttcggatttaagcgatttttttgttttagtttttcgagtagttgggattataggtatatattattatacgtgtttaatttttgtatttttagtagagatagggttttattatgttggttaggttggtttcgaatttttgattttaagcgatttatttattttggttttttaaagtggtgggattataggcgtgagttattgtttttggttcgagattttatttttaaggagggatttatttattatagtttttattttatatcgagtattgtttatattttttataaattgtattattttatgtaatttttattatagtttagtgaggtatgtaatattattttttataatatagatggggaaatagagatgtgatttatttatttaaggttatttggttaatgtgtgatagagttataattttattttagattgattttgttttaaaatttatggtttttattgtattatttagtattaaaaatttgttgatttgagattattgattttttataagttgttattgatatcggaggaatagttgtacgatgagtgttgtatatttagttattatattaagtattttagaaatatttttgtcgtattgaaagatgatatttatttttgatattggttttaagaggaattagttatttggaaggtacggaatggaaaatatgaaaaattgtgcgtagatttagaattggaatttataaatttagatgtgatttggtttagttttgtttttttataaaattatttggttgataattttagttttgatttgtagtgttattttttaattgtgaatgtttttgttttgttttatttatttattatttattatttatttatttattttgaggtagttttgttttgttgtttaggttggagtgtagtgatacgatttttgtttattgtaatttttattatttaggttgaagcgatttttttgttttttaagtagttgggattataggtatatgttatatatttggttaatttttgtatttttgtagagatggggttttattatgttggttaggttggttttaaattttcgattttaggtgattcgtttttttggttttttaaagtgttggtattataggtatgagttattgtatttggtttatttatttattattttattttgattatattttaattattttttttggagattgtgttttttttttatttttatttatattttagttattttttttagatttttttttttttttttgagacggagtttcgtttagtcgtttaggttggagtgtagtggtgtaattttagtttattgtaagtttcgtttttcgggtttacgttatttttttgttttagtttttggagtagttgggattataggagttcgttattatatttggttaattttttttgtatgtttagtagagatagggttttatcgtgttagttaggatggtttcgattttttgatttcgtgatttatttattttagttttttaaagtgttggtattataggtgtgagttatcgcgtatatgttttattttttagtttagtttaaaattgagtagttaaattagaatttttaatatatatttttttaaattaataatttatggtcgggtgcggtggtttatatttgtaattttaggattttgggaggtcgaggtaggtggattatttgaggttacgagttttgagattagtttggttaatatggtgaaattttttattattaaaaatatagaaattagtcgggcgtggtggtatatgtttgtaattttagttatttgggaggttgaggtaggagaattgtttgagtttgggaggtagaggatgtagtgagttgagattgcgttattgttttttagtttgggagatagagattatgttttaaaaaataaataataatttatttaagaagtatttattgaatatttgtatgtgaagtattgttttaggtgttgagatatagtggtgggggaagaaatttatttttgtttttatggaatttatatggaaggatgggtaataagtaaaataataatttaaataaaagattagttttaatgttggaattaaatttttgggtttataaatttttagttagtttagtttattttttaaaggattgtattatgatatttttttagagtttaaatttatattgatttataatttaaaggggttttattaagtttttttaattttgagtttatttttttattcgtaaatggaggttatagtttattttataagggttttgggttttttgtttaatttgatttgtttgtttgaagatagggttttattttgttggttaggttggagtgtattggtataattttagtttattgtagtttcgattttttgggttttggtgattttttggttttagttttttaagtagttgggattatagggatatgttattatatttacgtttttttgttgttgttgttttgtagagatagggtttatgaggattaaattagattttatttggttttttataaagattgggattatgttttttgggagttatagtagaggttagttgtatttgatttaaagttttatttttagttttttattttgttatttttttgttttaggtgagttttatgtttaatgtttagattttagtatttttttttagagatgtattgtattttttttttttttttttttttggagatagagttttattttgttatttcggttggagtgtagtggtacgatttcggattattgtaatttttatttttcgggtttaagcgatttatttgttttagttttttgagggattataggtatttattattacgtttagtttattttgtatttttagtagagatggggtttttttatgttagttaggttgattttaaattttcgattttaggtgattcgttcgttttagttttttatagtgttgggattataggtgtgagttatcgtattcggttaatgtattgtattttaaaaatgtttgtataatattgtagaatgatattttttttaaaaatcgaggtatagttttaagaggttttgagaatataggttttgaatgatattgttaagggtttaaaaattagaatttaaagtttggtaaatgtttgataatcggaaataaatattgtttggttgggtgtggtggtttatatttgtaattttaatattttaggaggttaaggtaggtagattatttgagtttaagagtttaagagtaggttgattaatatggcgaaattttatttttattaaaaatataaaaatttagttgggcgtagtggtttatttttgtaattttagtattttgggaggttgaggcgggtagattacgaggttagaagatagagattattttggttaatatagtgaaatttcgtttttattaaatatatataaaattagttgggtatggtggtacgtgtttgtagttttagttatttaagaggttgaggtaggagaatcgtttgaattcgggaggtggaggttgtagtgagttaagattacgttattgtattttagtttgggtgatagtgagatttcgttttaggaaaataaataaataaataaataaaaaaattagttgggcgtggtggtgggtgtttgtagttttagttatgtaggaagttgaggtaagagtattacgtgaattcgggaggcggaggttgtagtgagttgatatttcgttattgtattttagtttgggggatagggcgagattttgttttaaaaaaaaaaaaaaaaaaaagtaatattgagtaatattgttatatattgaataaatttttttaagtttatatatttttattaaaagtgatttagttaaagtaattttttaagttgttaaagggatttagtattatgtaaagattttagtttattttattaaaaaaaaaaaatataaaatatttattggaattatatttaataatggcgttttttagtgggttattgtaaggaaataattattaataattgtttttagataagtaattttgtgttagttttatttaataggtaattattatttagtagatattggatgaatagtatgggttggtaggttgggagatattaagtgaggagggtaaataagttgatatatggttttggggaaaattaaatttagttatttaggaggttgaggtaggaagattggttgagtttaagtttatagtgagttatggttatgttagtgtattgtagtttggattatagagattttgttttttaaaaaaataaaattaaatttgatttagatttttattttttgttatttttttttttttagagatatatagtttggataattttaaaaatatgataggtcgatttatttaaagttgtaatatagtttatagaatatttaattgtttgtaaattttttaaaattagtaatataatttgggataggaaaaataaaaaaagaggttaggagttgtggtttatatatataattttagtattttgggaggtaaaggtgggtggatcgtttgagtttgggtaataataaaaaaattcgtaaaaataaaaaaaataggtagcgtgtggtggtttatgtttgtaattttaatattttgggaggttaaggtgggaagatggtttgagtaggagggttgtttgaggttaggagtttaagattagtttgggtaatatagtgagattttatttttgtcgaaaaataaaaaataaaaataattagttggatgtggtggtttagtatttgtagttttagttatttagaaggttgaagttggaaattggttgagattaggaggttgagacgtgattgtgttattgtagtttagtttaggtgatagagtaagattttgttttaaaaaaaaaaaaaaaaaaaaaagttaggtatggtggtacgttatatgtttgtggatttagttattcgggaggttaagataggtttatttgagtttgggaggtagaggttttagtgatttgtgatttatgttattttattttagtttgggtgatagagtgagattttgttttaaaaaaagaaagtgaggtaagaagttgtttattgtgttgttatagagaagtatattatttaatgaaaaagagttaagttgtatttgaaagttattaaatgtagtgtttaaagttattattattgagattgttttaggtttacgtggagtagttagggttttgtcggaaggtattttgttagttaagtttttttttagttgtttttagttttttattattattcggaataaaagaatagaaaataatgatgttaagatatttatagttgggtttagtggtttacgtttgtaattttagtattttggtaggttgaggcggggggattataaggttaggaaattaaaattattttggttaatatggtagaatgttatttttattaaaaatataaaaattagttgggcgtggtggtacgtgtttgtaattttagttattcgggaggtttaggtaggagaatcgtttaaatttaggaggcggaggttgtagtgagtcgagatcgcgttattgtattttaatttggtgatagagtaagatttcgttttaaaaaaataaaaaaaaaaaagacgtttataaatattaaaaaatatggttgggtgtagtggtttatatttgtaatttaaatattttgggaggtcgaggcgggtggattataaggttaagagatcgagattagtttggttaatatggtgaaacgatttttattaaaaatataaaaattagttgggcgtgttggcgtatgtttatagttttagttatttgggaggttgaggtagaattgtttgaatttaggaggtggaggttgtagtgagtcgagatcgagttattgtattttagtttagcgatatagcgatattttgttttaaaaataaataaataagtttgttatatatgtgaagatagcgtttgtatatagtgtttttttttttttttttttttgagatagttttattttgttatttaggttggaatgtagtggtacgattttagtttattgtaagttttatttttcgggtttacgttatttttttgttttagttttttaagtagtagagattataggtgttagttattatgttaggttatggtttgttttttttgtatttttagtggagacggggttttattatgttagttaggatggtttcgatttgattttgtgatttatttattttagttttttaaagtgttgggattataggtatgagttattacgttcggtcgttttttttttttttttttttttttcgagatagttttattgtgttatttaggttgaagtgtaatggtgcgattttagtttattgtaatttcgtttttcgaatttaagcgatttttatgttttagttttttgagtagttgattatatataggtttgtgttattatattcggttaatttttgtatttttggtaaagacgaggttttattgtattggtcgggttggttttgaatttttgattttaggtgatttgtttatttagttttttaaagtgttggattataggtatatagtatttttgtttttaagaatgtttttttaaatttatattagggtattatttttagatagttattagaaaaaataatgtataggaatttttatattttttagcgagaattttggcgtttttttattttttaattttgaattatttataagttaatgttttatattattttaattataggatgaaaatagttttgtttttttagtttttatttttttttgtttattttttttatgtttatttgagtatatggatttagaatatttattgtattattatgaataatttagtattttataagttattttttaagtaggatagattaaggtagttcggtgtggatataattatatttatggttataaggaatacgtaatagaaaattagattttaattaagtaaaaggttgtttgtttttttttttttttgaaatatagtttcgttttgttatttaggttggagtgtggtacgcgattttagtttattgtaattttcgttttttaggtttaagtgatttttttattttagttttttaaatagttgggattataggtgtatattattatatttggttaattttttgtatttttagtagagatggggttttattttgttggttaggttggtttcgaattattgattttaggtgatttgttcgttttggtttttttaagtgttgggattataggcgtgagttatcgtgtttggtttgtttggttaattttatttttttaattttattagttgtatttttagttatttaaaggatataggaatggaggttaaaatagattatttggaggttagggatgttatgttttttattggggtaattttatggggtattgtgttttgtgaatgatagtgagtggaagataaaggattttttatattattttaggatgggagtttattcgattgtaatattgtgtattttgaaagagttgaaattattttttaatatcgggatttagttggtaatttaaggaagtattgtttatttgttatttaggtttggtgttaggataggagaaagtaggtttgtgggttggaggtcgttatagggtcgttaatgtagataaagggatgatttttcgagtttttgttgagttatatatggggattatatattatagtttttatttttgtaaggtttatagtttcgtgtttttggagtatttttttattttttttgttttaaaagtttttggcgtgtttttattataattttttttattatttttggttttaagatgtttttgatttgaaaaagggaaaaggtatttgtttagaaaagaaattaattataaatagattattaagttaatttaaatataaattaagtcgttaatataaattttttgtattttttttatgttttagagattaagcgttataagatatgatttgttagaagtagtttaataaattagtaagatgttttgggatatagtcgataagaataaagatattattttgatatttatttaaaagttggttgaaatttgggagaggtaagatgtagtttagaggttgtttttataaattagttttatttgatattttttgttttaaaatttttagattgatattaggtattgagaatattgtaagttttttagggaaagatttattagatatttattaaggttgttttaggttagtttatattgacggatgttgggaaagtattggggagatgtgtatattgtttttgaataaataatagagtagtttatagattagtgaagaagggagaggttttggggagagtatttgatgtggaagggatgttttatagtagtataggatgttggtattatatagtattattttttgagttattagcgagatgatgtagtttcgaagtcgggatattatttttcgattagtaagagagataggttataaggagatatagagaggggaagggaaatataaataggattaaaatacgtgattagttatagaaatttataaataaattatttatgatttagatagtattattttggaattttaaattaattaaatagttaattttaagggagattaaaaggaatggggtagggtgtagtgttttatgtttgtaattttagtattttgggaggtcgaggtgggtggattataaggttaggaatttaagattagtttgattaatatggtgaaattttatttttattaaaaatagataaattagtagagtatggtggggtatatttgtaattttagttatttaggaggttgaggtaggagaattatttgaatttaggaggtggagtttgtagtgagtcgagatggtattattgtattttagtttgggcgatagagtaagatttcgttttaaaataaaataaaataaaataaataaataaataaaaaaatagaaaaagaatggtttttttattggtttttcggttattattttgtaattttgttatttttattaataaatattaaattatttattgaatttatttttttagaagagaagataatatgggttttatgaatatatcgtgatggaaagttaaagtgatttagtttatattagtaatatagttaaaaataattaattttattggttataaaaatatagtaaagattgagttttttttattttattgaaaatggttatagtgtttgtttatttttaggtttgtaatgaagttttttgtttttttttttttgtgtttaggtgttgggtaaatttagatgaagtcgttgttatcgagaattattgaggtattatatggtaaattatgaaagtgggttttttgtcgttttattagggagggggaaatttggattaaaattttttgatttagttaaagaaatatattacgaagttaggttattgtaagattggcgggatgaatgaaaaggagattatagaatatatattttaagtatatttaaattggtgttttttttgtttataattgttgtcgtttatatgtatatatatagtatatatttttgtagagaacgttttgggatttagaggttatttatatattttagtagaaggtgatttttaatatttttttttgttatttttttttgtagttttttttgtattttaagttagaatttatgtgttagatattagagaagttgaagttaatgaggaagtgagttggagttttttgttggtttaggagtattgcgttgttttatgattttagtttatatttgaattttaaatatttattttgtttgtgagatgtgtgtttttgggtaggtaaggagatgggtggagttgggtgtaaatttatgtttggttttggtaggatagtttaagtttacgttttgttaaggaagagttcgtaggatttagggttgtgaaagttagtatattgtagtagttttttgtttattttatgtatattaacgtggttgtttgtagttattttattaagggaagaggtttttgttttatttagaaaataaaaacgtttatttagataaagttaagagattagtaaattttaatttgttttaggaagtatgttttttttaaaatagtaaatagttttaataatgtaatttcgtataagaaaagtagtgaaattttatttagaggtttagatgatagagtaagttttgttagtaataatatttattggattgattggacgtttgtttaagggttgtttaattagatttagtttgtttttgtttttaggatagttttagttttagtgttgagttgtagcgttttttggaggaagagagatagttgtattttttagtttatagttggaggggtttttttggtgaaagttagtttttttggagaaaaaggataaaatttgttttttataaggttattgatttatgattttgtgaattttgatcgttttgatgttacgtttaaggaatacgattagtttgtgggatgttagtttttattaatgtttagttattggggttttttaggttagaattttagagagttatggggatttaaaaatagttttgtagttttagttagtaaataggaatattaagagttcgatttatttttttatattttaggtttttcgtgtgtaaagagatagtttcgttagagaatattgtttggattttagtttggttagggtgatgaaggaataaatagtagttttggttatatattgttttgttttttgtagtttttttttttgattttatatttttattttttttttttttttttaatggtttaggtttaataatttttgatttagagtatattattgtgattttatttttttttttggttgttatgaatattttttttttaaaaatatagatagaaggttaggtgcggtggtttatatttgtaattttagtattttgggaggttgaggtaggtcgattatttgaggttaggagttttagattagtttgattaatatggagaaatttcgtttttattaaaagtataaaattagtcgggtatagtggcgtatgtttgtaattttagttatttaggaggttgaggtaggagaatcgtttgaattcgggaggtagaggttgtagtgagtcgagattttattattgtattttagtttgggtaataagagtgaaatttcgttttaaaaaaataaataaataaataaataaataaataaataaataaataaaataaagatagaggttaggtatggtggtttatgttcgtaattttagtattttgggaggtcgaggtgggtagattatttgaggttaggagtttgagattagtttggttaatatggtgaaatttgtttttattaaaaatataaaaattagttaggtatgacgtacgtcggtaattttagttatttgggaggttaaggtagaattgtttgaatttaagaggcggacgttgtagtgagtcgagatcgcgttattgtattttagtttgggtaatagagtaagatttcgttattaaaaaaaaagaaaaatttaaaaaataatataaaatagagatagagttttgttttgttatttaagttggaatgtagtggtgtgattatagtttattgtagttttgagtttttgggtttaagtaattttttggttttagttttttgagtagttaggattataggtatgtgttattacgttcggttaatttttttttaatttttttgtagagaggggggttttgttatgttgtttaggttggttttgaatttttaggtttaagtagttttttttttttggttttttaaagcgttgggattataggtatgagttattatattcggtttgttattaatattttgacgtgaataatattttttttattttttgcgttaaaagttaatattattaataaaagtttagtttaaagtataggttatcgtaagttataagatttaaagaaatgatttagtagtaggttttaataagagttggggagttagtttgaattaaggagattgagaaaggatgtagtagagttcgatatttggtttaagattcggatttttgtaaggatgatatggttttttcgttagagatatataatggaaggtttattttttagttttatagaaaagtattaagaggttggagtgtaaagcgtaggatatattgataaggttttttttttgtaagaaattttttattgtaagtttattttttgtagatttttttttttgaaatatataaagaaatgatattatttaagttagatttttagaaaggtttttattattttttttttatttttttttgagatgtttgaggttaattataatatttaagtattgagaattatagtaagagtaggtaatttaagttatttgaggggaattagtgataattacgattttttattttaaaagatttttttatagttttttttttttttttttttttttttttgaggaatatttagattttttttaattttatttagttaatatttttatagttattttttatgatagttttttgtggtttagtaggattagattaatttttgtttggatatatttttgtttatatatttttttttattttagattttttgaattagttatttaaagtttttttatttttttaggattaattttaatgtttgttttttttataagttttttttattgaaatttttttttgtataattatagtttatttatttttttattgttagggattaggttagttattttatattttttgttggggaatttaatcgtgtttggtattcggtatagagtttggtatagtaagtttttttgtaaatatacgttggattgaagattaaggtgaattatggtattttataaaaggttgtggtttagttattgtggttgtttggaatgttagtaattatattttatatatggttgaatgaaatgttttttaatttataaaaatttaatgtaaagataattttttaaggaatatttttattatgtaaggttgttatatttaaaaggaaaattgttaataattagtatttaagggtttttttttttaattttttgttgggattttattttatggatgtttttgattttattatatgttaattgttttttttttcgggagatttggatagggtgaaaagtttatatatatatttaggtagtaaattttatagtagataaataggagttaaaggggtaattttagtgtaaattaaagttttttggtggaataaagggttttacggttttttttagtttattgggttttagtttatggttttagttgtagtttttattagtttttttttaggaaggtttatggacgagagtagtaagatcgaatttagtttggagttggtttttattttttattttttttgttgaatttataagttaagttttatatttggatatatgttttatgtttatgtgttatattataaataattagtaaggttagatgtggtggtttacgtttgtaattttagtattttgggaggtcgaagttggtggattatttgaggttaggagtttgagattagtttgattaatataatgaaattttatttttattaaaaatataaaaattagttgggcgtggtggcgggtgtttgtaattttagttatttgggaggttgaggtaggagaatcgtttgaatttgggaggtggaggttgtagtgagttaagattatgttattgtattttagtttgggcgatagagcgagattttattttaaaaaaaaaaaaatatgaattagtaatttgaaatcgaataagttatatatttatattagaagttatataacggttaaatgtaatgaatgttttttttatgtaattataagtggaatgattgttttatgaatgaaatcgttagtttgtttcgattttgtaaatattaatttgatatcgacgttatttttgtgattcgttttattacgatgttttttattttattaatgtatttgaaagataaaatataaggggtttatttatttgtgagtagattttttgataagattatatattatttgagatgtcggtttaatagggtgaaagtttggaataggcgttatatttagtaaatttatgtaattatattgtttggatttatttttagaaattgttaattttaaatatttttttacgtataaagtttttattaattatttttagatatattattattttaagtagtttatttagtttaaaaattttattttgttcgattatacgataatgaaaaatacggattatttttttgtggtatatggatgagttttgtattagttaaaggaagagaaaggaaatttgagttaggattttaattatataagtttgtttacgttttttttatttatttattgtttgttttttttaagtttttttgttagttttttattcgcgattttaatgagacgtatttagtgttgaggttaagtttttagatttttttatttttcggttatttaatttaatatttttaaaatattattttgtgttgtgattgtgttatttttttgaattttaaattttatttaattgttagttatttaattttgttatttagatgattaataggtatttttaaatgtattaagtataaaattaagttttttcgtagttttttttagttttttatagtaaatcgagataggggatgagttgtttttattttagttaacggtgattttatttttttagttgtttaggttaaaaatttcggagagttttttgattttttttttttttttacgttttaggataagtttagtagtaaaatttgttggttttatttttaaaatatatgtaggaaataaaaggtatttaaattggaaaggaagaagtaaatttatttttatttatagttgacggggttttatgtatagtaaagtttaaagaatataaaatttaatagttttttatgattttaaaaaaatattcggaaaataaaatttgtgtagattttaattatttttttattttttattgtttttattttagttgaagttattattattttagattatgagtatggtttttaatttatttttttaagtttgttttatttttttttaattttttattagtagttagagtgagtttaagtttagattaagttttttttttgttttattttttttagtgttttttagattatataaagtagaagttaaaatgtttattttggttataaggtaggtttacgttcgtttattttagttttttgtttatatttgtttttttttttttttttatttattttgttttaattttattggtttgttttttggggttaatttttattgaatgtttttaggtattaggttttgtgttaaatattttataggtattattttattgaattttaaagaaaattttaggttaggtatagtggtttacgtttgtaattttagtattttgggaggttaagtggggggaaattattagaggttagtagttcgagattagtttggttaatatggtgaaattttgtttttattaaaaatcgaaaaaaattagttaggcgtggtggagggcgtttgtaattttagttattcgggaggttgaagaaggagaattgtttgaattcgggaggcgaaggttgtagtgagtcgagattacgttattgtattttagtttcggtaatagagtaagattttatttcggaaaaaaaaaaaaaaaaaaaaagagaaaattttatgaagtaggttatgttattatatttattttgtagaggaggtaattaaggtttggagtggtgatataatatggggaaatttttgaagtttgtattgatttgtattattttatttatagttatggttaaaattttagatttatagtatgatagggtaggtaggggtggggtgggggataaggagggggtaggaaaagtttggttgtataatttgatgttgtaagaaagggaatatatattttttgtttttatttggtttttaaagtttttatatagattaatttgtttattttttttatagagttagtaatagatgtaatgagtttttttttttttatatacgttttatggtttttgatgtaaggcgaagatataaagaaaggatacgagggtaattcgaaatgatttttttttttttaagaataacgtgttttttaaagttaataggttttttttgtaaagcgtggtttttgtgttggttgttttttttgtttttagtgttttttttttagatagttatttggatattattttttttatttaggtttgtttaggtgttattttttgtagtaggtttattttgattgtgttattgaaaatatagtttattttgttgttattattttttttatatattattgattttgttttatttttttttttattgtattattgtttaatattttgaataatttatttattgcgtttattatttatttttttttgttagaattttattaggatagagattttttattttgttataataatttaattgtataaaatatatgttgaaagtattaatgaaagaatgaattttaagattttttaggggttaggtatggtggtttatgtttgtaattttagtattttgggaggtcgaggcgggtagattatatttgaggttaggggatcgagattagtttggttaatatagtgaaattttgtttttattaaaaaaaaaaaaaattaaaaattagttgggtatggtggcgtgtatttgtaattttagttatttaggaggttgaggtaggagaattatttgaatttaggaggtagaggttgtagtgagtcgagatcgtacgattgatttaagatagatttcgttttaaaaaagaaaaaaaaattttttggtatttattaattttaaattaataggttaaagggtaatgttatgaatgttgtgttttttgtatatatataagtaaaaaaataataataataaaggttgaaatattagtgttatttatgatgatataatggttggttttatttttttttttatataattgttttatttaatttttattatcgtattatattgttattattattattttatagatgaggaaattgatcgtggagaggtaatgtcgttaataagatgtgatggtagtaggatcggaattttaattgtttgatttaagagtttttttttttaattataatatattgtattatattttttagatttaaaatgtgtataaatgggtgtatgtagtataatgtaattgtttgttttaagatcgaataattacggattttaaattgaagaggaggtagttaagaacgtttatcgtttttttagagagttgaaaattggaaaagagtttgtatttaattttttttagttttttaggttttttataaggaaggattaaagatttggattttaggtagaagatttaaaagttatagttatcggaggttaggagtggagggttttagggagttgagataaatgtagacggggatatataagatgtagggagtaagaagtacgaggttcggaagcgaggtgtgtaggatgtttagacgaagtgttttgggtttcgcggggagttatatatatagggatacgaggtttggattacgtgtagagagttttgaagtcgttttttgaagtttcgatttttttaagtttttacgtatcgtatgaattttgtgttcgtagtgattgtatttttcggtattattagatgttttttagtgtcgcggtttagtttttcgttaagaggtttgcgagttattggaagttttatttttatcgttattttggcgttaatgagttgcgtaggcgtagtttagtcgggagttgcgatattcgattttataattttaggtcgcgttcggaggggcggggaagggcggggatttagagtagttgttaatgagaatttacggtttagaggttatgtttataattggtaataataaggcgaattcgaagggaagggagtcgagttgttatgtttattattggtaaggaagtattcgtggaataataaaattttacgttgtgtggcgtgtgattttttattaaaattgttttgtatttattattttatttattgtttattagggttagagataattgagaaacggatttttgagtttttgtttaattttaagttgttgaaattcgatattttgtaagagagagtttaggaggatggagagatgggatttatagaaaatattatttgaatagaaagaagagtttttttttatacggtttttagtagcgttaggattttatattgcggtcgtttcgtgggtgttggtttaatattattatttataattttaaatcgggttttagatattttttatttggttttgtttttttataaggatttttttgaataagttaatttattttaatattttttttggaaataagttaaaaatcgtttaagaaaataggttaaattttgtaagttaggtatatttggtagggaagggaagagtatatataatgcgaagattttggtttgtatttagttatatagcgagttgagcgttttttgtgtgttaggcgttgttttaaggatttagcggggaatagacggatgtttttgtgggtttttttgcggtttcgttttaataggagggtatttttcgtttttttttttcgttttttattattttttttttttttttgttttgtatttataagaaattaattggggatggtaattttttatgtatagggattttaaagacgattaaatgaaattattggtattagttgtggttagtaaagtcggtaaattaagttcgttttttgaagaaagatttatcgagttaattgttttataaatttttaaagcgatagtattttttttatttaagtaagttttacgattatatttaagaaagttagttttgttaggtagtcgatgatatgaatgttagtgtttcgaggttttgggtaagcgggttgttagattttcgttttttgtcgtgtttggaggaaggtattagagtttagtttttcggtttagttttgtcgcggttataagagggcgatggtgttttttgagttcgcgtagttcggtagtcggggagttaggtttagcgagcggttttaggcggagcgagagtgtaggtttgatattatttaagtttttttcgggagggagagacgtcgtttttatttcgcgtatttttatagcgtttataaggttggtattgtggatattagtttatggaggaggaaatcgaggttttaaaaggaatggaatttatattagtagatggttgtaaagtcgatgtgtgttttaattgtacgcgatttattttagagtttgtattttttattagaaatagttcgagtgtttcggttggttttttgttgagtgttttataaatattatgttatgtattttttatttttagtttattttcgagataggtattgttatttttgatgattatttggggttatcgagttttttaaatagattcgtaattgggattagaatttaaaacgatagggatttttttttttttatttttagtgtttttttttttgtattattatacgtatttttttttatttttatttttttcgagatagagtttttgttatttaggttggagtataatgatacgattatggtttattgtagtttcgtttttttgggtttaggtaattttattattttagttttttgaatagtttggattataggtatatgttattaggttcggttaattttttgtatttgttttgtgaagatagggttttatcgtgttgtttaatttgatttcgaatttttaaatttaagtgattcgtttattttggttttttaaagtgttgggattataggtatgagttattaagttcggttatatttatttttttacgattagtagataagtgggtattcggagacgaagtagtatattttagggggtttgtaaaaagtatagattttttaggtattgagtttgtaaatttcgaatatttgagataggttttagttaatttagaaagtttattttattaagattgaggatgtgtttgtggtataagtttaggaggttttgataatttgtgtttaaggtggtcggagcgtagtttggttttatatattttggggagatatgaggtattaattaatatatgtgagatgaatattggttcggtttggaaaggttggataattcgaagttgggaaggggttttttggtgataggtagataagaaataaatggttgaggttaggcgcggtggtttacgtttgtaattttagtattttgggaggtcgaggtgggcggattacgaggttaggagatcgagattattttggttaatacggtgaaatttcgtttttattaaaaatataaaaaaaaaaaaaaaaaaaaattagtcgggtatggtggttggtgtttgtagttttagttattcgggaggttgaggtaggagaatggttttaattcgggacgcggagtttgtagtgagtcgagatcgtatcgttgtattttagtttgggcgatagagtgagatttcgttttaaaaaaaaaaaaaaaaaaaaagaaagaaaaaagaaataaatggttgtattttttgtatttttagtttttgattagcgtttttaaaggaggtaattaggtatgtatttattttagtgagtagaggggtgattttgaatagaacgggaggtaggtttgttttaagtagtttttagtttgatttatttttttttttagtttagtgattttggggttttaagatttatttgttttttataaggttttgtaaaggtaaggtttagaagtttgtgcgtgttttaattttttatgtaattttaatggcggaaaaggtttaagatttattgatgttatatatttgtgtattttcgtagttattgttttaggttgattaacggtattttttattagggagataattttttagtttgtttttttaattttatttttgttttttttattatttaattttcgtatagtagttagagagagttttaaaaatagattaaattatttttttgtttttagtattttttgatttttgtttgtttttgattttacgttcgttttaatttattgcgttatttattatgttgtagtcggattgttaacggtggagggtgtttagtttttcggcgttttggataaaatatatagataaaataaggaaagaataaagtaataaaagtagagatttattgaaaacgaaagtatattttatagggtaagaatagtttaagtaaagaaatttaataggttttttatagaagtttttggggtttaaatattttttaaaggttttttattggttatttggtgtacgttttgtgtaaatgaaggagtggttcgtgattagtttgattggttgtggaaagtggttaattagaggttgaagttaaaagttatattttacgttaatgtttgattggttgtggaaagttattaattagaggttgaagtgaagttataaagttatatttttatgtaaatgaagatttggttatttattagtttgattggtagtgggaagggagtaattagaggtatttttagttttttatttgtatatagaaaagttgggattgtaaagggagtagtttttggttttttggttatttggacgtggaaagttggggttttttttttgatttagttttagaaagttagtgtgaattagttttatgttttttgtttttagattttatttttttgttttaagattagttggttttttttcggttttatagtattaagttttttattattttagggttttttattttggtttttttttgtatgaattttttttttttaggtttttgtgtggttggttttttttttttatttatggtttgtttaaatattatttttttagagaagatttttttgattattttatttggaataattttttagtttttttttttaattttttgattttgttttattttttgttattgattttttttttttttttttttttttttttttttgagagagagatttggttttgttatttaggttggagtgtaatggcgcgattttagtttattgtaatttttgttttttgggttaaagagatttttttgttttagttttcggagtagttgggattataggaatttattattacgtttagttaatttttgtatttttaggaaatacggggttttattatgttggttaggtttgttttaattttttgatttgaagtgatttgtttattttggttttttatagtgttgggattataggtgtgagttattatgtttgggttttaattttttttttttttttttttttttttgtttattgattgtagtttttttttattagaatatgtattgttgaaaatagggattttatttattttgtttattatatattaatgtttagatttaggtttggtatatagggtagttataaaatatttgttgaaaaaaatataatatatttataaaatatagatttgtttgtttgtttatcgtttgtttttttataggatatgagttttattaatatttagattgtttatttggtttattgtttatttcgtatatatgtttgatatatagtaggtttttgtattaagtatgtatttgttttttttttttttttttttttttttttttgagacggaattttgttttgtcgtttaggttagagtgtaatagtgtggtttttgtttattgtaatttttgttttttgggtttaagcgattttttttttgaatttattgtagttttttgagtagttgggattttaggtatttgttattacgtttggttaatttttgtatttttagtagagacggggttttattatgttggttaggttgttttcgaatttttaatttggtgatttattcgtttcggttttttaaagtgttgggattataggtatgagttattgtgtttagagtttttgtttttttgtatttagatgttttgagattttggggatttgttttttttagagggattgttttaattagggttaattggtttttggagatagtgaagaatttatttaggaggttttttgtaaatgtatgttatttaatttagagtttatatttataaatattttttttattaggtttttttatttagggttagtatttaattgttttgattattttaaggttagatattagatagttagggaaagtttttatataaattttagtatttattgtagttatttaaattaattaattttaaggttgtttattttgttttatttatttttttttatggaaattataataaaggtttttgtttatgtttatttttttttttttttgttttttgattaattcggtgtttttttgtgcggttttgtatggcgtattttgttttttgtttttagaataaagatttttatgttggtatattatgttagattttaggatttttgaaatagttttttgttgggcgtagtggtttacgtttgtaattttagttttgtaggaggttgggtgggtggattatttgaggttaggagtttaagattagtttggttaatatggtgaaatattatttttattaaaaatataaaaattagtcgggtatggtggtaggtgtttgtaattttagttatttaaggggttgagataggagaattgtttgaatttgggaggtggaggttgtagtgagtcgagattgtgttattttatttaagtttggttgatagagtgagattttattaaaataaataaataaataataataataataataaattttttagtaaatttttgttgaattgatgaataaatttttttagtaggtatttgttgggtattagttatgtgttgtgggattatagagttggattatttgaggttttagttattaaagtgttaagatgtttaaagatggggaagggagagggaggatagatagaaaagtttgtttgatagaggaagtatttgaatgagttttgaaatgagggaattatggattttgaggagttggggtggggaataggtgaattttaggtgaaagtaattggtaaggaaattttgaaaaatatgaaaatagaggtagtagggattttttagtttaaaatttttggtttaatttttatttatttattgggtttatttcgtgttttattgaaatagtaaaatggtaaaaataattgtataaatttttttttttttttttttttgagatagagtttcgttggagtataatggtgcgattttggcgtattgtaatttttattttttaggtttaagtgatttttgtgttttagttttttaagtaggtgggattataggcgtttgttattacgtttagttaatttttatatttttagtagagttggggtttttttatgttggttaggttggtgtcgaatttttagttttaagtgattcgtttatttgtgttttttaaagtgttgggattataggcgtgaattattacgtttggttaattgtataaattttttaagtagagacgtgtatatagattttagtttaaggatgtttattaaagtattatttgttttgaaagtattagaaatagtgttaatgtttatggttatattaagtatgtttttgaatatttttatatttttttaattaagaagtggggtttggttaggagtggtggtttaggtttgtaattttagtattttgggaggttgaggtcggtggattatttgaggtcgggagttcgagattagttttattaatatggtaaaatttcgtttttattaaaaatataaaattagttaggtgtggtggtaggcgtttgtaattttagttattcgggaggttgaggtaggagaattgttcgaatttaggaggtagaggttgtagtgagtcgagattgtgttattgtatcgtagtttgggtaagaagagtaaaatttcgtattaaaaaaaaaaaaaaaaaaaaaaagaagtgggttttgtgtatttttttttgttataggataggattttgattgttttgatggatagtatatgttagaaatgtttttgtgtgattttaaaagttaggttagaatagattatgttatttttttttggttttttttttttttttttttttttttttttttttgagatagagttttattttgtagtttaggttggagtgtagtggtttgattttagtttattgtaagttttattttttagatttatgttatttttttgttttagttttttgagtagttgggattataggtattcgttattacgtttggttaattgtttgtgtttttagtagagatggggttttattatgttagttagaatggttttaattttttgattttatgattcgttcgtttcggttttttaaagtgttgagattataggcgtgagttattgcgttcggtttttttggtttttttgaaatatttgtttttgaagttttgagttgatatataagaagtttgattattttgaggtaattatattgtgaagaaatagttatgtttggtaattaatttgttattgtttataattttttttgtttatttatagatatatattttagtaggttatttgtaaggtaggagggaagttggaaatttagagtgttcgtttttttagtttaagggatttaagaatagtgggtatcggtcgagcgcggtggtttatatttgtaattttagtattttgggaggttaggagttcgagattagtttggttaatgtggtgaaattttatttttattaaaaatataaaaaattagtcgggtatagtggtgtatgtttgtagttatagttatttgagaggttgaggtaggagaataggagaattgtttgaattgagtaggtagaggttgtagtgagttgagatcgtgttattgtattttagtttaggagatagagtaagatttcgtttaaaaaaaaaaaaaaaaaaaaaagaatgggtattagaaagggttgaaggaagggagtgtaaatagttgttttagatgttttttgggggttgtttagtggggtgagtggtaggagtatttgttattttttttattcgttaaaggtatgtttgtattaataaagattttaatttattgagtatatattatgtgttaagtattgagttatgtatgtatttatatatagatattattttatttgatttttatgttaattttaggagttaaatattattttattttatatgtgaggaatttgaggtatagagatattaattgatttgtttaagattatatagttagtgaatggtagagtggagttttagatttagattattggtttttatttagaattttttattgttggaggttttggattatgtaataaggtaagaaaaagaaataaaagatattttaattaggatggaataggtaaaagtgtttttatttattggtaatatgatt

SEQ ID NO: 99 - DNA, 5020 bp, Artificial Sequence
  chemically treated genomic DNA (Homo sapiens)
agtaaagtataattttatatgtagtagtataaaaaatgtttagatgtttagggttttttttaaaattttattattttggaagattaataatagttttattaaataattttatatatgaatgaaaaatggagaaaaattttattaagatgttaattttattaaaatgaaatgggttatttttttttttcgttagaaaaaaaaaggttgggaaaataaaatttataagttggttttttttttttttttttttttacgagttggttttaaggttatttttaatatttattttttttaatgatattaatatatcgttatttatttgattttaaaattgtaattggttagttttaagtgaatataagtgttatgtttttgtagttttattatatttaatttgtaatttatttaataaaagattttaaatttataatgtatgtacggtgattaaaatatgagtatttttttaagttttgttattataacgtttgtttttttgggagtataatgatatggtttttttttttttttttttttgagacggagtttcgttcggtcgtttaggttggagtgtagtgatgcgattttggtttatagtaattttcgtttttcgggtttaagcgatttttttgttttagttttcggaggaattgggattataggcgttcgttattacgttcggttgattattcgtatttttggtagagatggggttttattatgttggttaggttagtttcgaatttttgattttaagtgatttatttgtttcggtttttaaatataatgatttgttttaaggttgtaagtatttttattaggtatttatggggtgagtagggtggggtagatgtgtttcggaatggggtatagcggataggaagtaacggtttataataacgtgaacgtttttgacgtgtagcgggagttttagaaagcgtggtcgaatttgtagtttttaataaatggttcgtttttaaattttagttttaattttttttgagcgataggggtatgttattagtacggggggaaatgagatataagaaacgttcgaaagggaaaaataaggttgggttgttttttttttttggggttaagatagaggtatagaaggtttaggtttgggaggttggattattttcggttggatgttgagtcgggtgggagtttaaatagtagggggtttataggaggtcggtttaggtagtttcgcgtttatttattaggttaggtttaggtacgtttttagcgatagtaggtttaggtacgttcgggggtttgtttagttttcgttttcgttgtttcgggttacgggggttttttcgttttcgtttcgtttttcgggtttcgtagtaggggtttttttgggtttcgatttttttcggttttttattttagatatgtttggagattttaggacgataagtttagggtagtttttttattagggggagtaggacgtggtcgttttggcgttcgtgggaattttgggcggtgatcgcgtttttttatagatttggtatcgtttagagtttagtttttttttttttttcggtattttcgttgttttattgagttttttagttgttagttttatagtttttttaggagaggtgggcggcgattttaatttatagcgttttttattgcgatattgttttaaattcgaggaaatttaaattttcgggcgcgcgtaggtcgacgggattcgaggaggaggggtaggacgaaggggtcgcgcgcgttacgtcgggcgcgtcgtcgttgttcgagttcggtattggtgggaacgcggcgcgtttttgaggtttagttacgtttcgttcgcggggtaggcgggtatttttacgcgcgcgggtatgagtcgtggtaggagtgcgcggcggtagcggtggtcgttttttggggtttggggtgtgtttatttgtataagcgggcgcgcgtcgttcgggttgggtggattcggcgggatttgattgtttcgttgtttagaggcggagaagaagaggtagcgagtggacgtgattgttttatttcgggtaaaagggatagaattagaggtggggagtttgggtagtcggcgattcgcgaagatttgaggtgtcgtagcggtattcggagtagcgtcgggtttttttcggggtgtagtcgtcgtcgggggaagggcgttataggtcgggaagattttttttttttgtgtttagtagtggggtttatcggagggcggttcgtgggtcgggttttatcgcggcgtttcgggattgtggggttaggttgcgttgggtggacgtttatttcgttaattttcggaggtttttgggggttttcgtgcgtttcggggttgtagagatttaggggaggcgtttgtgaggttcggatttgtttcggggcgaagggtatgtggcgagatagagttttgtatttttaattttcggtggaaaatttttgttgtcgtttttttttatcggtttggagttttttagttttgtttcggtagtgtcgttttttttattaagatttaggcgtaaaggtttgggtaagttgattttttcgttttttttttcgagttaggttttttggaggtttggtagttgattttagggattgagaatttgaggatatggaatatttgataattattttgtttttgtattaggaagagaaattttgtaatgaggaagtagtaaatttggggttttcgtggataaacgtgcgttgttttttgttttacgtttatgaagagttttggttttttattttgttgtgggttataaaaggttttgagatttagtttagataagttgtgtagttttaaaacgtatttaagatttgtatattttagtttaataggattaggtgaaattggaaattagttttagaaaattagagtgttttatttgtttagttattggatattatttaaaaaatttatttatttttgtttttttatatcgaattttattattataaattaaggaatattttatgtttaagaggataaaaacgttattaatattttaaaaaatgagagttttgattcgaattaataattttttattagttttgtgtttttgttgggtattttgtaagttttgataagtataggtaaatgttttacgttcgtttttgtttttttaagtgttatatttggtgattttaaaaatagttattgaagtttgataattattgtttttttttgtgagttttaagttatttgtgttttgtttttgtatttcgggtatttatatttttatttttttttttttttttttttttgagtagattgtgaattattttaggtaaatgatttaattttttttgtagttttggtgtttgatatatagggaggggtataaatgtgtattgaatgaatgaattgataaattcgtttagatttttttattttatatattgtgtaaagttttgttaatgttttgaaaatttgtagatattgtgaattgggttttatgtttatggaaaaatttgtattatatttgaaataaagttgttagaaacgttaagtattttattataaaggttgttattttttttttatgtttttttggtttgagaaattatattagaaagtgttttttgttgttttgtgggaaatgtgtttagtaaggaggatttagagttgatattttttttgaacgagaattaatatttaatagtaataatgttttatttatttttatgtttgataaggaaaataagaagttttttaatattaggattttaatgtaattattattttatataattttaattaaaaaaggaagtattttattgtaagaaatgataatgtgtgttaaaaaaaattgatagtagaggtcgggtatggtggggtttataagtgtaattttagtattttcggaggttgtggcgggtggattatttgaggttaggaatttaagattagtttggttaatatggtgaaatttcgtttgtattaaaaaaaaaaaaaaaataagataaggtgggggagaaattttaaattttgttatttagaagtaatttaaatatttcgatgaataaatttttaaacgtttatatatatttatatgatattaatatttgtttttttttttgagatggaatcgtattttgttgtttaggttggagtatagtagagtggtttcggtttattgtaagttttgtcgttttggtttacgttatttttttgatttagtttttcgagtagttgggattataggtatttgttattgtatttggttaattttgtatttttagtagagacggagttttatcgtgttaattaggatggttttaattttttgatttcgcgatttgtttattttggttttttaaagtgttgggattataggtttgaatcgttgcgttcggtttttacgttatgtgttgtatgtgggattatgtttttgtttttttttttttttttttttagtaatagtattatgaatatttttttatgttaatatatggagatatgtgttataattttgaatggttgtataatattttattttatatatatattttaatttttaaaatttatatttagaatgatggatatttaggttgcgtttattattgaaatattttttattaatttttttttttttttattttttattttagttttttaatgtgttgggattataggtttgagttattatatttgattggaaatttattaattttttttgtggatatttttatatatgtatttgaatgtttttttgaagtaaatttttagaaatgggatttttgggttagagagaaagtttattttaaataattttatattttattgttttttagaaaaattgtatttattttttagtttttttaattagtgtataagaatggttatttttttatatttttttaagtattgggttttgtttatttaaaaatttttgttaaggaaaaaaaattagttttgttttttttacgttttttgtttattagtgagattatgtatttttttatatttttattggtttgataaatattttggtgttttggttgtagt

SEQ ID NO: 100 - DNA, 5020 bp, Artificial Sequence
  chemically treated genomic DNA (Homo sapiens)
gttatagttaaaatattaaaatatttgttaggttaataaaaatatgaaaagatatataattttattaataaataagaaacgtaaaaagaataaaattgattttttttttttggtaaaaatttttaaatggataaaatttagtgtttggaaaggtatgagaaaatggttatttttatgtattaattggggaaattagaaaatgaatgtaatttttttggaaagtagtaagatatggaattgtttaaaataagttttttttttaatttagaaattttatttttaaggatttattttaaggagatatttaaatatatatgtaaaaatatttataaggagaattaatgagtttttaattaggtgtggtagtttaagtttataattttagtatattgggaggttagagtaaaaaataaaaagaaaaaagaattaatggaggatgttttagtgatgaacgtaatttaaatgtttattattttgaatatagattttaaaaattagggtatgtatataaaatggaatattatgtagttatttaaaattatgatatatatttttatgtattgatatggaaagatgtttataatattgttgttgaaaaaaaaaaaaaaaaaaaatagaaatatgattttatatataatatataacgtgggggtcgggcgtaacggtttaggtttgtaattttagtattttgggaggttaaggtgagtagatcgcgaggttaggagattgagattattttggttaatacggtgaaatttcgtttttattaaaaatataaaattagttagatgtagtggtaggtgtttgtaattttagttgttcgggaggttgagttaggagaatggcgtgagttagggcggtagagtttgtagtgagtcgagattattttattgtattttagtttgagtaatagagtgcgattttattttaaaaaaaaaaataagtgttggtattatatgaatatatatagacgtttagaagtttatttatcgaaatgtttgagttatttttgagtagtaaaatttgggattttttttttattttgttttattttttttttttttttagtatagacggggttttattatgttgattaggttggttttgaatttttgattttaggtgatttattcgttatagttttcgaaagtgttgggattatatttgtgagttttattatgttcggtttttattgttaattttttttagtatatattattattttttataataaaatatttttttttttaattaagattgtataaaatagtgattatattgaagttttaatattaagagattttttgttttttttattaaatataagagtgaatagagtattgttattattgagtattagttttcgtttaaggaggatgttagttttaggttttttttgttaaatatattttttataaagtaataggaaatattttttgatgtgattttttagattaggaggatatgaggaaagaataatagtttttatagtaaaatatttgacgtttttagtaattttattttaaatataatgtaaatttttttatgggtataaaatttagtttataatatttgtaagtttttaaaatattaatagaattttatataatgtatagagtgaaagagtttaaacgggtttattaatttatttatttaatatatatttgtgtttttttttatatgttagatattaagattatagaaaagattgagttatttgtttgaaataatttatagtttatttaaagaagaaaaagagagagagagtgggaatgtgaatgttcgaagtgtaaaaatagagtataagtaatttggagtttatagaagggggtaataattattaagttttaatgattgtttttgaagttattaaatgtagtatttggaaaaatagggacggacgtagggtatttgtttatgtttgttaaggtttataaaatgtttagtaggggtataaaattgataaaaagttattgattcgaattaaaatttttattttttaaaatgttaataacgtttttgtttttttaaatataaaatgttttttaatttatagtaatgaaattcgatgtgaaaaaataagaatgaatgaattttttaggtgatgtttaatagttaagtaaataagatattttggttttttgaaattaatttttaattttatttagttttgttaaattaaaatatgtaaattttaaatacgttttaaaattgtataatttatttgaattaagttttaaaattttttgtaatttataataaaatggaaagttaaaattttttatggacgtaaaatagaaaatagcgtacgtttatttacgaaaattttaagtttattatttttttattatagaatttttttttttggtataggagtaggatggttattaaatattttatgtttttaaatttttagtttttgaaattagttattaagtttttaaagaatttggttcggggagaaaagcgaggaggttaatttatttaagtttttgcgtttaggttttagtggggagggcggtattgtcgggataagattgggagattttaggtcggtggagggaaacggtaataggagttttttatcgggaattaggggtgtagggttttgtttcgttatatatttttcgtttcggggtaggttcgggttttataggcgttttttttggatttttgtagtttcggggcgtacgaagatttttagggattttcgaaggttggcgaggtgggcgtttatttaacgtagtttgattttatagtttcggagcgtcgcggtgaggttcggtttacgggtcgtttttcggtggattttattattggatataaagggaggaggttttttcggtttgtggcgtttttttttcgacggcggttgtatttcggagggagttcggcgttatttcggatgtcgttgcggtattttaagttttcgcgggtcgtcgattgtttagattttttatttttggttttattttttttgttcgggatagagtagttacgtttattcgttattttttttttttcgtttttggatagcggagtagttaaatttcgtcggatttatttagttcggacggcgcgcgttcgtttatgtaaataaatatattttaagttttaaggggcggttatcgttgtcgtcgcgtatttttgttacggtttatgttcgcgcgcgtagaagtgttcgtttatttcgcggacggggcgtggttaagttttagggacgcgtcgcgtttttattaatgtcggattcgggtagcggcggcgcgttcgacgtggcgcgcgcgattttttcgttttgtttttttttttcgggtttcgtcggtttgcgcgcgttcgggagtttgaattttttcggatttggagtaatatcgtagtggaaggcgttgtgggttgaggtcgtcgtttattttttttaggggaattatggagttggtagttgaaagatttagtgaagtaacgaggatgtcggggagagggaaggggttgggttttgggcggtgttaagtttgtgagggggcgcggttatcgtttagggtttttacgaacgttaaggcggttacgttttgttttttttggtgaagaagttgttttgggtttgtcgttttagggtttttagatatgtttgaggtgaagagtcggaagaagtcggggtttaagggagtttttgttgcggagttcgggaagcggagcgagggcgggaagattttcgtggttcggagtagcggaggcgggggttgggtagattttcgaacgtgtttgagtttgttgtcgttggggacgtgtttgggtttggtttggtaagtggacgcgaggttgtttgggtcggttttttgtgggttttttgttgtttgggtttttattcggtttaatatttagtcggaggtgatttaattttttagatttgggttttttgtgtttttgttttgattttaaaggaaggaaatagtttagttttgtttttttttttcgggcgttttttgtattttattttttttcgtgttggtagtatgtttttatcgtttagaaggagttgaggttaaggtttgggaacgagttatttgttaagagttgtagattcggttacgttttttgaagttttcgttatacgttagaagcgtttacgttgttataaatcgttattttttgttcgttgtgttttatttcgggatatatttgttttattttatttattttataaatatttaatggaaatatttgtaattttaaaatagattattatgtttggagatcgaggtaggtggattatttgaggttaggagttcgagattagtttggttaatatggtgaaattttatttttattaaaaatacgaataattagtcgggcgtggtggcgggcgtttgtagttttagttttttcggaggttgaggtaggagaatcgtttgaattcgggaggcggaggttgttatgagttaagatcgtattattgtattttagtttgggcgatcgagcgagatttcgttttaaaaaaaaaaaaaaaagaaaattatattattatgtttttaaaggagtaaacgttatagtagtagagtttggaggagtgtttatattttgattatcgtgtatgtattatgaatttaaggttttttattaagtaagttatagattgaatatggtaaagttataaaaatatagtatttgtgtttatttaaaattaattagttgtagttttaaaattaggtaaatggcgatatattggtgttattaggaaaaatgaatattagaaataattttaaaattaattcgtaaaaaaagaaaaaagaaaaaaattaatttgtgaattttatttttttagtttttttttttttggcgggaggagggaatagtttattttattttaataagattggtattttaatagaatttttttttattttttatttatgtgtaaagttatttagtaagattgttgttaattttttagagtgatagaattttagaagagattttggatatttagatattttttatgttattatatatggaattatattttatt

SEQ ID NO: 101 - DNA, 2240 bp, Artificial Sequence
  chemically treated genomic DNA (Homo sapiens)
attgaggattcggaaatgaggtttaagggtagttaaggatggttgtagttttatatgattagttgttaaagtaagttgaggtattgaagatggagaatttaaattttcgataagagttagaagataattttaattattttataaaattggaaattgaggtatttaatatgaaggaagtatttaaataattataaggaagtattgaagatgaagttatggttttttttggatagattgatttattagagcgttttaaagagtttaatttagatagtagtaatttttttggagtaaaattgcggttaaaaatgttttttcgtttttatggaagtcgggaaggatttgtattaagtcgttttggagagtgtagttttgtttttatgggtttatttttaagaagagggtttgtaaatggaagtagagaaagtattggatatttagaagaatttgagaaagagaggttattgttttttgttgattttgataaagaagaaaaggaaaaagattggtattacgtttaattttagaattttattaaaagaatagatagtttttttttaattgaaaatttttttttataaatagatatgattagaaggtaattggaatatgaagtaaggtaaattagagttgcgatggaagaataattaggtatttgttaggatatggaaaaacgagtatagcgaagaatagttagaatttagtaaatcgaaaaggatatatttcgtatacgatagtttttatagttttaagtaatagaagtagagaggttattttagaataagtatgaaatcggtttatatgatgttgagcggtagaatgaaggttaaggagtgggagaaattaatatggtaatttttggtaatggttagggtttaattatacgaatggattatgaaatagttagtgttttgagttttagtagtatatattttgtatttcgaaggttgataagttatttgggaattaaggtggaaatggtgtatttattgttgttaatgtttggtatttatgataaggatgatatgtcgcgaattttgttagttatgtttagtttttaagatagttgtatatttatgcgatagtttggatgtttttttttttttatttagtttttatatggtaatgataaagattttgtattgttgggaaattttcggggtagtaaagaggttcgggttagggttagtgtagtattttataatattatttatttatagtttgatgataagagaggtaggcgtgaaattcgagttttttattttttggaatagatacgcgtttattgtgaaatttgttgggagtggtaggaagtttatgaattaggtatggattaggataaaaatttaatgttagtttttgttgaatattagatttgttttgttgtgtgtgttttaatgaaatttttatttgatgaagagtatagatatgtaatgaatgaattagggggattataggttattgtagaattattgtaagtggattgtgaaatgtacgggtttattaatgattattatagtattatattaagacgatatgttggaatggttttgataaatttgatttttggagatgtagttaataaggttacgttatgttttatgaaaggttgtatgagagtatttgtggtttaattaaaatttgaaagtgaagatttatagtaggttattgtaagtgttttgaggaatttgttttggcgagtagatgtaaatagtaaaaagacgttgcgagaagttggaagtgtgaaagtattgatggaatgtgttttagaagttaaaaaggaattaatttttaaaagcgtattgagtgttttatggaatttgttagtatattgtattgagaataaagttgatatatgtgttgtagatggtgtatttgtatttttggttggtatttttatttatcggagttagataaatattttagttattattgaaagtggaggtgggatattacggaatgtgtttagtttgatagttataaatgaggattataggtaaattttaagagagaataattgtttataaattttattataatatttaaaattttatagtttgataatagttagtaatgtatgtggaattttgtggaattttttagtaagaaattttaaagattaggaagtattatgggatatgggggtagttagtatgtttaagaattttatttatttaaagtataaaatgattgttatgggaagtgttgtagttttaaggaattttatggtaaataggttt

SEQ ID NO: 102 - DNA, 2240 bp, Artificial Sequence
  chemically treated genomic DNA (Homo sapiens)
aggtttatttgttatgagattttttaaagttgtagtattttttatagtaattattttgtgttttgaatgaatgaggtttttgagtatgttaattgtttttatgttttataatgttttttggtttttaggattttttgttgagagattttataaagttttatatgtattattgattattgttaaattatgagattttaagtgttgtaataaagtttgtagatagttgtttttttttaggatttgtttgtggtttttatttgtagttattaagttggatatatttcgtaatattttatttttatttttaataatggttaaagtgtttgtttggtttcggtaagtaagagtgttaattaaaaatgtaagtgtattatttatagtatatatattagttttatttttagtgtaatgtgttgataaattttataaggtatttaatacgtttttgagggttgatttttttttaatttttaaagtatattttattaatgtttttatatttttaatttttcgtaacgtttttttattatttatatttgttcgttaagataaattttttaaaatatttgtaataatttgttgtaagtttttatttttagattttagttgggttataagtgtttttatgtagttttttatagagtatagcgtagttttgttggttatatttttaaaagttaagtttgttaaagttattttagtatatcgttttagtgtaatattgtagtggttattagtaagttcgtatattttatagtttatttgtaataattttgtaatggtttgtagtttttttagtttatttattgtatgtttatgttttttattaaatgaaagttttattagaatatatatagtaggatagatttgatgtttaataggagttggtattggatttttgttttggtttatgtttggtttatgagttttttgttatttttaataggttttatagtaagcgcgtatttgttttaaaagatgaaggattcggattttacgtttgttttttttgttattaggttgtgagtgaatgatgttgtggagtgttgtattggttttggttcgagtttttttattgtttcgggaattttttaataatatagagtttttgttattgttatgtaaaagttggatgaggagaggaagatatttagattgtcgtatggatatatagttgttttgggagttagatatagttagtaaagttcgcgatatattatttttattatgagtattaagtattgataataatgaatatattatttttattttggtttttagatgatttgttagttttcgaggtgtagagtgtgtgttattagaatttaaaatattggttgttttatggtttattcgtgtagttgaattttgattattattagaagttgttatgttgattttttttattttttgatttttattttgtcgtttagtattatgtgagtcggttttatgtttgttttgagatgatttttttgtttttgttgtttgggattgtaaaagttgtcgtatacgaagtatgtttttttcgatttgttgaattttggttatttttcgttgtgttcgtttttttatattttggtaggtatttagttgtttttttatcgtaattttgatttgttttgttttatattttaattgttttttggttatatttgtttgtaaggaaaaatttttagttaaaggaagattatttatttttttagtgagattttgaagttgagcgtaatattagttttttttttttttttttttgttaagattagtaagaagtaatgattttttttttttaagtttttttaaatatttagtattttttttgtttttatttataaattttttttttggaaatgaatttataggaataggattgtattttttagaacggtttgatatagatttttttcggtttttataagaacggagggatatttttgatcgtagttttattttagggaaattattgttatttaagttaagttttttaagacgttttaataaattaatttgtttagaagaagttatagttttatttttaatatttttttgtagttgtttaagtattttttttatattagatgttttagtttttagttttgtaagatgattggaattattttttagtttttgtcgaagatttgagttttttatttttagtgttttaatttgttttaataattgattatatgaagttgtagttatttttggttatttttggattttattttcgagtttttaat

SEQ ID NO: 103 - DNA, 8759 bp, Artificial Sequence
  chemically treated genomic DNA (Homo sapiens)
tagtttggaagagggtagttaggggagaagttagggttggagttatgagaaaggataagatgagatgatggttttaatattgaggatagaaagaatattgagatgagaaagtagtttattataagtatttatgtaaaggaaatagtagatgtttataaattagtagaggtaataattttgaaagtttatttataagtttttttttttatttttaatttagtttaaatgtaattatttaaattgttttttatttttttttttggattatgaatgagttttttaaatgtagggtttatagtgttttatttattagtgaattttaagtgtttagtatagagtttggtaaatagtaaatgtttaataaatattcgtttagtgtatgaattggagtgattttttattttgtttataagttgaaaaaaggtttattatatatttaaatatgttgaaattatagggtatttggtaattttttaaaattaaaatttttagtttggaaatagaattttaattttgtgaaaataaaatttatttatttatttaaaaaatatttattaaataatgattatgttttatattaggttgagttttaaggatttaatgatgaataaaaattaatatgatttttgtttttaggaaatatatagtttagtgaggaaaatagattgtgagaagttttttaataaatattgggtgttattaaaatatattaaaaggtgagtgggtgagggatttgagttagtttaggtggtttaggaagtttttttggatgtgttgatatgtataggtattaattagataaatagagagaaggatgaattaatattgtaggtagagggaatagaatatgtaaaggtaggaaggattatggagtcgttggaggatttgaataaaggttagtgtaagtggattttagaaaataggaggaaaggtgtatgagatgagattagagaggtagattatgtggggtatggttaatgttttggatttttttattaagagtaatggggagatagtgataggatttaaacggggaaataatatgattagattaaattttttaaaaaattttttatgtaaatatatattgagagttaattattgataaagatttaaaggtaataaagtggagagagaatagtatttttaaaaaatggtgttaaaataataggatatttatattaaaagttgggtatttgtttataaaatttaatttaaaatggattatagatttaaatgtaaaattgaaagttatataatttttggaagaaaatatagatgggaatttgtgtgattttgagtttgaaaatgatttattatatttgatattataattcgtaagttaatataatttataagtgaataaagtgatgaattggattttattagaatttaaaatgtttgtgttttaaaagatattggtatgataatgaagataaattatagataagatattgttgaattatatttttgataaaggaattgtgtttagaatatataattttaaaatttttataataaattataagtagtttaattaaaaaaaaaaaaagagaaaaaatttatagtttttattaaagaaagtatataattgtaaaataagtatatgaaaaatgttttgtatttttatttatgggagaaataaaaattaaatgggaaagatatttttaattagaatattaaaattaaaaagattgattatattaagtattggtgaagtggaaatgtaaaatgatataattatttaggaagatgatttggaagttttttataaaagtaggtgtatatttattttgtgatttatttattttatggttaagtatttatttgagagaaatgaaagaatatatttatataaagatgtttatataaatatttatagtagttttatttgtagtagttttaaattgaaaagaatttaaatgtttattaaaagtgaatggataaataaagcgtggtatagtaatgtaatagaatattatttagtaataaagaagaatgagttagtgatatatataatagtttaaatgtatattaaaggtattgtgtttagtgaaagatgtaagtaaaaaaaaaaaagagtatatgttgtatagttttattgatataaaattttggaaagtgaaaaatagtttatattgatagaaagtagattattggttgtttgaggaggaggagtataggagaggtggagggaaaatgtataaagtggtataataaaaatttttggaattatagatatatttattattttgattgagtgatgattttatgagtgtacgcgtgtgttaaaaatgattaatttatgtaattttaaatatgtgtagtttattgtatatattaattatattttagtacggttattaaaaagaaattttttggttgtataatgtagaattgattttaggaaagagtggagggaggatgattatttatagtgttttaggtggaagagaacggtgttttttggaagtgaattaggttggtaataatagagatgaaataaatgggtagatgtgtgagatatttaggaaataaaattcgatggttattattttttaaaggttagtttattttggttttttagagtaaagagttagggaagattttattaataaattttttttgaagttgtagaggaagtttatagtagaaatttatttttaatttgattaatttgagagaatatttttggttttatttgattattaaaaaattgtaaagaataggaggagaaagaagaagaaagttggtataaatagtgaatttatataatattaattaataattgttttttgtttttaaaagtaatgggaagaaaatgagatttgagttggaagattagagtttaaaatttaaataaagtatatggttttaatatgtttatagtagttaattttttttgataatgatataattgttgatagtattatttttaaaaataaaaataatatagtaattttttagatttgtagaatgtttttttgtttataagtttgttttatatatattatgttttttaaatgatatattagttttttgagggtaatttatattggtaatagtttttagatgtggaaattgtgaagataatgttggtgatgtggaagtaatataaattttggagttttttagatttaggtttgaatgttagattgttttttatttagagtaattttagagtattattttttattttaatttttttttaggtttttttgtgtttatgtgttttttttatttttgtttattgtttatttagtgatttttgtatttttttttattgttagtgtgtagatatatagtttttttggttttgagatttatgttaattttattttattattttgttagtttatttaatttttattgagtaatgttagttgaaagttgtggtgggattaaatgttgtaatgagtatttaaatgaggttgaagtatttacgtattttatttatatatggtgaggtatatttaaggaaggttgtagttattaaaattttaggaaataattttttatttttttaggtgaaagggtttttaggtttttgtgttttggaaggtttatttatagttattttttaaatgataatgcgattgatgagtttagagtttagtttaaatagtaatggattggaagattagtttaggttttattaatgtggaatatagaataaattatgtttttgttttagtttgtttatttgtgaaatagagtttattatatttagttttttttgtttttaggtttgagttattttttttggttaaggtaagtaaatgtttatgatgtttggttgtgtataagataaagttataataaagttataatttattttttttttgtagaagattgtaaaaagtaaaagagatttaggtaaaaatttcggaatgatttttggaatagagagtttttttagaattagaagttaaaggaatttaaaatatagggaggtttagggtttttattgatataaaggaaagatgttttttttataggtttacgtttatattttttttttttttttatttttatttgtatttttatttttatatagggtttatgggattttttttataaaagagtagttgtagtaatttatattattttttacgtttggttgtttattaagaggcgaaaagtagttttatataggttttatttttggatagttttagttgtaaagtttaaaatatgcgaaggtaatttggaaaagtaagcggttgtatataaagtaaacgtttatagagttttggataaaattgagcgtttatgtgtatatggtaagtgtttttagtgtttgtgtgtttatttgtttgtttgggtgattttgtttttgagagtttggatgagaaatgtatggttaaaggtaattttagataggaagaaaggtagagaagagggtagaaatgatttttgatttttggggttgagggtttttagagtaaatggtataatgttacgaggttcgatttatttttatgacggaatttaaggttttagtaagtatttgttggtttggttatggtttgttttttagtttgtaggagatttttttatttttttatttgcgcgtttttattagttttgaaaagaatttttggtagttaggagtaggtatttttatcgttttttttttttttttttcgtttttattttgttggttttttagattgggttttggaattaaatttggtgagtgttggtttttaggaaatttggagttttggcgtttaaattttggtttaggaaagtaggagttatttaggaagtaggggttttttagggttagagttagttttttttgttttcgtttacgttgcgttagtatttgtttttttaaagttattaggtaggcgttagcgcgcggtgaggggaggggagaaaaggaaaggggaggggagggaaaaggaggtgggaaggtaaggaggtcggttcggtgggggcgggattcgattcgtaaattgttgtatttgttttttattttttagcgtttttttcgagatttcggggagttagtttgttgggagagcgggacggttcggagtaagtttagaggtagaggaggcgatagagggaaaaagggtcgagttagtcgttttagtgttgtataggagtcgaagggacgtattacgttagttttagttcggttttagcgatagttaacgttttttgtagcgcggcggtttcgaagtcgtcgttcggagttgttttttttttttcggtgaagtttttaaaagttgttaaagattcggaggaagtaaggaaagtgtttggtaggattgacggttgtttttgttttttttttttttatttcgtttttttttattttgttttttttttttttttcgttttttttttcgtagttgttttagtcggttatttttagttaattttttttattatttttttttttattcgttttttcgttttcgtcggtttagcgttgttagttcgagtttgtagagaggtaattttttttggttgcgagcgggcgagttagttgtatattgtaaagaaggtttttaggagttaggcgattggggagcggttttagtattgtagttacgattcgtttggttaggttgtacgcggagagaattttttgtttttttttattttttttttatttttttttgttttttttatttcgagtgcggagttagagattaaaagatgaaaaggtagttaggtttttagtagttaaaaaataaaataaataaaaataaaaaagtcgaaataaaagaaaaagataataatttagtttttatttgtatttattttagtggatattgaatttggaaggtggaggattttgttttttttttttaagatttgggtattttttgaatttattttttaagtattaagagatagattgtgagtttagtagggtagattttgtttatcgtgtgtttttttttgtacgagattttgaggttgttagagcgttttttgcgtggttgttttcgtaagtttttttttttggagtttttcgtaggtgggtagttagttgtagcgattatcgtattattatagtttgttgaatttttttgagtaagagaaggggaggcggggtaagggaagtaggtggaagatttagttaagtttaaggatggaagtgtagttagggttgggaagggtttattttcggtcgtcgtttaagatttatcgaggagttttttagaatttgttttagagcgtgcgcgaagtgatttagaattcgggttttaggtatttagaggtcgcgagcgtagtatttttcggcgttagtttgttgttgttgtagtagtagtagtagtagtagtagtagtagtagtagtagtagtagtagtagtagtagtagtagtagtaagagattagttttaggtagtagtagtagtagtagggtgaggatggttttttttaagtttatcgtagaggttttataggttatttggttttggatgaggaatagtaatttttatagtcgtagtcggttttggagtgttatttcgagagaggttgcgttttagagtttggagtcgtcgtggtcgttagtaaggggttgtcgtagtagttgttagtattttcggacgaggatgatttagttgttttatttacgttgtttttgttgggttttatttttttcggtttaagtagttgtttcgttgattttaaagatattttgagcgaggttagtattatgtaatttttttagtaatagtagtaggaagtagtattcgaaggtagtagtagcgggagagcgagggaggtttcgggggtttttattttttttaaggataattatttagggggtatttcgattatttttgataacgttaaggagttgtgtaaggtagtgtcggtgtttatgggtttgggtgtggaggcgttggagtatttgagtttaggggaatagtttcggggggattgtatgtacgttttatttttgggagttttattcgttgtgcgttttattttttgtgttttattggtcgaatgtaaaggttttttgttagacgatagcgtaggtaagagtattgaagatattgttgagtattttttttttaagggaggttatattaaagggttagaaggcgagagtttaggttgttttggtagcgttgtagtagggagtttcgggatatttgaattgtcgtttattttgtttttttataagttcggagtattggacgaggtagttgcgtattagagtcgcgattattataattttttattggttttggtcggatcgtcgtttttttcgtcgtttttttatttttacgttcgtattaagttggagaattcgttggattacggtagcgtttgggcggttgcggcggcgtagtgtcgttatggggatttggcgagtttgtatggcgcgggtgtagcgggattcggttttgggttatttttagtcgtcgtttttttattttggtatattttttttatagtcgaagaaggttagttgtatggatcgtgtggtggtggtgggggtggtggcggcggcggcggcggcggcggcggcggcggcggcggcggcggcggcggcgaggcgggagttgtagttttttacggttatattcggtttttttaggggttggcgggttaggaaagcgattttatcgtatttgatgtgtggtattttggcggtatggtgagtagagtgttttattttagttttatttgtgttaaaagcgaaatgggtttttggatggatagttatttcggattttacggggatatgcggtaagtttttttttttagaaatgtcgtttttcggtttagggtagagttattttgtgttttggggtatttagcggtttttatttgcgcgaatatttagattgtttttgggagagtttagtagggtaaatttagagttttttcgtggattttcggtttgttagaggtttaatttgagtttttttaatttttgttgcgtgttttgggtgttgatttttgtttttttagattttttaatttttttaatcgttttaaatttttattattttttggtattcgaggttttaaatagaaattttattgtacgggttatttttagagataaagtttttaagttttttattttttttttttttttgtttttaaagtttgagaattttaataggaatttgggtaattttttttttttaggtttgttaggattttatttttagtttgcgtagattagagttaaaaagatcggtttaatagttttttagcgggtattttttagagaggtaaagtgaaattttcggttagggaaagaaagtggtttttgggtgttgaggtttgttgtgtgaaagggtgaattttttttttttgaagtaattggggatttgttttagggttggaggttagtagagataatttaaatcgttatgtttagagtaggtagaggggtaatttttttggtaaagattttataggatttgtatttatagttttttaacgttggttgattatgttgaaagtagttgtttgggtcggtttttttttgtaaagtgtttattttttttgtggattataatagatttatagttttttattttaggtttgtattagatttataaagaggagaatatttttttaatgtataatttaattaggtttgattttgatttataaaattgttggaaaatatttttttgtaaagtattttttgttattttagtgtgttttaaaatttttattggggagggtggagtgaggttttttattatatttttttatttttaggatatgtttgtattttagaatatgtgtagttagtt

SEQ ID NO: 104 - DNA, 8759 bp, Artificial Sequence
  chemically treated genomic DNA (Homo sapiens)
agttaattgtatatattttaaaatgtaaatatgttttaaaaataaaggaatataataaaaaattttattttattttttttagtggagattttggagtatattgaaatagtaggaaatgttttataaaaaaatgttttttaatagttttgtaagttagagttaagtttaattaaattgtatattaaaagaatatttttttttttatagatttgatgtaaatttgaagtagggggttgtggatttgttataatttatagagaaaataaatattttataagagaaaatcgatttaagtaattatttttaatatagttaattaacgttgagaaattgtgagtgtaaattttgtgaagtttttattaagaaagttgtttttttgtttattttaaatatgacggtttggattatttttattgatttttagttttggagtaagtttttagttgttttaggagaaagaagtttatttttttatatagtagattttagtatttagagattattttttttttttaatcgagaattttattttatttttttggaggatattcgttgagaagttattgggtcggtttttttgattttaatttgcgtaggttgaaagtgaaattttaatagatttgaagaggagaaattgtttaaatttttgttgaggtttttagattttgaggataggaggaaaggaagagtggagggtttgggagttttatttttgaaggtggttcgtgtaataggatttttgtttgggatttcgagtattaggaggtagtgagaatttggggcggttgggggagttgaagaatttgggagggtaggaattagtatttagggtacgtagtagaaattaggagagtttaggttaaatttttggtaggtcgggagtttacgggagagttttaggtttattttgttgagtttttttaggggtaatttgagtgttcgcgtaggtaggagtcgttagatattttagaatatagagtgattttgttttgggtcgaaaggcgatatttttggaaggaaaaatttatcgtatgttttcgtaaggttcggagtagttatttatttaggggtttatttcgtttttgatataagtgggattgggatagggtattttgtttattatgtcgttagggtattatatattaggtgcggtgaagtcgtttttttggttcgttagtttttgagggggtcgagtgtagtcgtagggggttatagttttcgtttcgtcgtcgtcgtcgtcgtcgtcgtcgtcgtcgtcgtcgtcgtcgtcgtcgttattatttttattattattatacggtttatataattggtttttttcggttgtgaagagagtgtgttaggatgaggaagcggcggttgagggtgatttagaatcgggtttcgttgtattcgcgttatgtaggttcgttaggtttttatagcggtattgcgtcgtcgtagtcgtttaggcgttgtcgtagtttagcgggttttttagtttgatgcgagcgtggggatggggaggcggcggagggggcggcggttcggttagagttagtggaaagttgtagtagtcgcgattttggtacgtagttgtttcgtttagtgtttcggatttgtagagagatagggtagacggtagtttaagtgtttcggagttttttgttgtagcgttgttagagtagtttaggttttcgttttttagttttttggtgtaattttttttgaaaggggaatatttagtagtatttttagtgtttttgtttgcgttgtcgtttagtagagaatttttgtattcggttaatggggtataaggagtgggacgtatagcgggtggaatttttaaaagtggggcgtatatgtaattttttcgaagttgtttttttggatttagatgttttaacgtttttatatttaggtttatggatatcgatattgttttatataattttttggcgttgttagaaatggtcgaagtgttttttaagtaattgtttttggaggaagtgggagttttcgaggtttttttcgttttttcgttgttgttgttttcggatattgttttttgttgttgttgttgaaggagttgtatggtgttggtttcgtttaggatgtttttaaggttagcggagtagttgtttaagtcggggaaagtggggtttagtagggataacgtggatggggtagttgagttattttcgttcggaggtgttggtagttgttgcggtagttttttgttggcggttacggcggttttaggttttgggacgtaatttttttcggggtggtattttagggtcgattgcggttgtgaaggttgttgttttttatttaggattaggtagtttgtggggtttttacgatgggtttggggagaattatttttattttgttgttgttgttgttgtttggggttagttttttgttgttgttgttgttgttgttgttgttgttgttgttgttgttgttgttgttgttgttgttgttgttgtagtagtagtaaattggcgtcgggaggtgttgcgttcgcggtttttgggtgtttggggttcgggttttggattatttcgcgtacgttttggaatagattttggaaagtttttcggtaggttttggacggcggtcgagggtagattttttttagttttaattgtatttttatttttgagtttggttgaattttttatttattttttttatttcgttttttttttttttgtttagaagagtttaataggttgtgatgatgcggtagtcgttgtagttagttgtttatttgcgggaagttttagagaaggaaatttgcgggagtaattacgtaaaaagcgttttgatagttttaaagtttcgtgtagaagaagatatacggtggataagatttgttttgttaggtttatagtttgttttttaatatttgaagggtagatttaaaagatgtttagattttaaaagaaaaaaataaaattttttattttttaaatttagtgtttattgaagtaggtgtaaataagaattgagttattattttttttttttatttcggtttttttgtttttgtttgttttgttttttggttattgaagatttgattgtttttttattttttgatttttggtttcgtattcggggtggggaaggtaggaggaggtggagagagagtgggggaaaatagagggtttttttcgcgtgtagtttaattaggcgggtcgtggttgtagtgttgaagtcgttttttagtcgtttggtttttaagagttttttttgtaatgtgtagttagttcgttcgttcgtagttaaagggagttatttttttgtaaattcgggttggtagcgttgggtcgacgggggcgggggggcgggtggggagaagggtggtgaggggggttggttgagagtagtcgattgaggtagttgcgggagagaagacgggggagggggggaaggtagggtggggggaggcggggtggagaggaggaggataaaggtagtcgttagttttattaggtattttttttgtttttttcgagtttttagtagtttttaaaaattttatcgaagaggaaagggtagtttcgggcggcggtttcgaagtcgtcgcgttgtaagaggcgttggttgtcgttggagtcgggttggggttggcgtggtgcgttttttcggtttttgtatagtattggagcggttagttcggttttttttttttttgtcgttttttttgtttttgggtttgtttcggatcgtttcgtttttttagtaagttggtttttcgggatttcggagggggcgttgggaggtggagagtaaatgtaatagtttgcgagtcgggtttcgtttttatcgggtcggtttttttgtttttttattttttttttttttttttttttttttttttttttttttttttttatcgcgcgttaacgtttgtttagtggttttggagaaataagtgttggcgtagcgtgggcgagggtaggagaggttagttttagttttggaggatttttgttttttgaatagtttttgtttttttaaattaaggtttaggcgttagggttttagattttttggaggttagtatttattaaatttggttttaaagtttaatttaaaaaattaatagggtggaggcgagggagggaggaaaaggacgataggaatatttgtttttggttgttaggggttttttttaggattgataagagcgcgtagatgggagagtgggagagttttttataaattgaggagtaagttatgattaagttagtagatatttgttgaaattttagatttcgttatagggatagatcgggtttcgtggtattgtgttatttgttttaggaatttttagttttaagaattagaggttatttttatttttttttttgtttttttttttgtttggaattgtttttaattatgtattttttatttagatttttaaaggtaaaattatttagataagtaggtaaatatataaatattaaaaatatttgttatgtatatataggcgtttaattttgtttagagttttgtaaacgtttgttttgtatgtagtcgtttgtttttttaagttgttttcgtatattttaaattttataattggaattatttaaggatagaatttatatagggttgtttttcgttttttgatggatagttaggcgtagaggatgatgtgggttattgtaattgtttttttgtggaggaggttttataagttttgtgtaaaggtggagatgtaagtgggaatggaaagagagagaaaatgtaaacgtaaatttataaggaaaatattttttttttatgttagtagagattttgggtttttttatgttttaaatttttttgatttttgattttggggaggttttttgttttaaaagttatttcgagatttttgtttgggttttttttgttttttgtagttttttatagagaaaagatgggttgtagttttgttgtagttttattttgtgtatagttaaatattataggtatttatttattttgattaaagaaggtaatttaaatttaaaggtaaggaagattggatatgataggttttattttatagatgaataggttgaaataaggatataatttgttttatgttttatattagtaaaatttaaattagttttttagtttattgttatttgagttagattttagatttattaatcgtattgttatttgggaaatggttataaatgaattttttagaatataaaggtttgaagatttttttatttgaggaggtgaaaaattattttttgagattttaatggttatagttttttttgaatatattttattatatgtaagtagaatgcgtagatattttaattttatttgaatatttattgtaatatttaattttattataatttttaattagtattgtttaataggaattgagtgggttggtaggatggtagaatggaattaatataggttttagagttaggagaattatgtgtttatatattaatagtgaaggaaggtgtaaaaattattgaatgaataatggataggagtgaagaggatatatagatataaagaggtttgaaaaaaaattaaggtgagaaataatgttttgaagttattttgaataaaaagtagtttgatatttaaatttgggtttgaaagattttaaagtttatgttgtttttatattattaatattgtttttatagtttttatatttgaaaattgttgttaatataagttatttttagaaggttagtgtgttatttaaaagatataatgtgtatagaataaatttgtaaataggaaagtattttataaatttgaaggattattatgttatttttatttttaaagatggtgttgttaataattatattattattaggaaaggttaattattataagtatattagggttatatattttatttggattttgaattttgattttttagtttaaattttattttttttttattgtttttaagaataagagataattattgattaatattatataagtttattgtttgtattagttttttttttttttttttttttgttttttgtagttttttagtaattaaatggaattagaggtgtttttttagattagttaggttgagagtaagtttttgttataagttttttttgtaattttaagagggatttattaataaagttttttttagttttttgttttggaaagttaggatgagttgatttttggaaaatggtgattatcgggttttattttttaagtattttatatatttgtttatttattttatttttgttgttgttaatttagtttatttttagaaggtatcgtttttttttatttggagtattgtaaatggttattttttttttatttttttttagaattagttttgtattgtgtagttagagggtttttttttaatagtcgtattgaggtataattgatatatataataaattgtatatatttaaagttgtataaattgattatttttgatatacgcgtgtatttatgaaattattatttaattaagatagtgaatatatttatgattttaaaagtttttattgtgttattttgtatattttttttttattttttttatattttttttttttaggtaattaatgatttgttttttgttagtatagattgttttttattttttagagttttatgttaatggaattatatagtatgtatttttttttttttttatttgtattttttattgagtataatgtttttgatgtatatttaagttgttatgtatattattagtttatttttttttattgttaagtagtattttattgtattgttgtattacgttttgtttatttatttatttttgatggatatttgggttttttttagtttggggttattataaataaaattgttataaatatttgtataaatatttttgtatggatgtatttttttattttttttaggtaaatatttagttatggaatgggtgagttatagggtaggtatatatttatttttgtaagaaatttttaaattatttttttaagtgattgtattattttatatttttattttattaatatttggtatggttagtttttttaattttagtattttaattagaggtgttttttttatttaatttttattttttttatgaataaagatgtagagtattttttatgtgtttattttataattgtatattttttttgatgaagattgtaaattttttttttttttttttttttaattgggttatttgtaatttattatgggggttttagagttatgtattttgagtataatttttttattagaaatatgatttaataatattttatttgtagtttgtttttattattatattagtgttttttgaagtataaatattttaaattttgatgaagtttagtttattattttgtttatttatgaattatgttaatttacggattatggtgttagatataataaattatttttaaatttaagattatatagatttttatttgtgtttttttttagaagttgtatagtttttagttttatatttaggtttgtgatttattttgaattaagttttgtagatagatatttaatttttaatatagatgttttattgttttggtattattttttgaaaatattattttttttttattttgttgtttttgaatttttgttaataattaatttttaatatatatttgtatagagggttttttagaaagtttaatttggttatattattttttcgtttaagttttgttattgtttttttattgtttttaatagaaaagtttaaaatattaattatattttatatgatttgtttttttgattttattttatatatttttttttttgttttttgagatttatttatattggtttttatttaggttttttaacgattttataattttttttgtttttgtatattttgttttttttatttgtaatgttggtttatttttttttttatttatttagttaatgtttatgtatattagtatatttaggaagattttttgaattatttaggttagtttaagttttttatttatttattttttaatatattttaatagtatttagtatttgttggaggattttttataatttgttttttttattgaattgtatgttttttaagagtaggaattatgttggtttttgtttattattgaatttttaggatttagtttggtgtgggatatggttattgtttaataaatattttttgaataaatgaatggattttatttttatagaattaaaattttgtttttaaattgggagttttggttttggggggttgttaaatgttttgtgattttagtatatttaggtatgtaataaatttttttttaatttatgagtaaagtagagaattattttaatttatgtattgaacgaatatttgttaagtatttattatttgttaggttttgtgttaggtatttggaatttattgatgaataggatattgtggattttgtatttaaggagtttatttatgatttaggaaggagagtgaagaataatttaaataattatatttgaattggattggagatgaaaagaggggtttatgaataaatttttagagttgttgtttttgttgatttgtggatatttgttattttttttgtatagatgtttataatggattatttttttattttaatattttttttgtttttaatgttgaagttattattttattttatttttttttatagttttagttttaattttttttttggttgtttttttttaggtta

SEQ ID NO: 105 - DNA, 5269 bp, Artificial Sequence
  chemically treated genomic DNA (Homo sapiens)
  unsure (460): unknown base
aagtcggtatattttggaggaggaggggtttggttagtggtggtaggagggaggttgtggaagttagggtttttgttatatatgtgaagtttgtaatatgttttagaaagaatagatggtatatgtattttaaaaggtaaatgattttaaacggtgttagatttttagttaaatttttttcggattagagaaagatttggaaagggaaggagattgtttatagaatataaatttttttcgtaaaagatagttttgtataggattattttaaaatatgttagaaatatattttggggtaaaatattttgatcgtttttagggttgttatttgttatgtgatgttatattagaattaggttggaatttgttttgagataggtttttattttgttgtttagattggagtatagtggttgtgattacggtttattgtagtttcgatttttttgatgtgggaggnttaagtgatttttttatattagttttttaaatagttgggattataggcggttattattatattgggttaaatttttttaaagtagagataagttttttttatgttgtttaggttggtttttaatttttggttttaatttttttattttttaggattataggcgttaggttagattttataggtttttagatttttacgtattaggtatttggtagggggagggattatagtggtagaagagtagtattagtggtttatattatatattttggttttagttggttggggtatataaaattaggtgttatcgttaacgattaggtttatagggtattgttgttaaaatttgttgttaataatttttatatattttttaaaacgttcggtaggcggtggtgcgtagtttttaatgtattcgtcgttaggcgtttataggtaagggagaaagaagttagacggagttcggagatgtggagggtagacgtaggcgtatttggaaaagggattggcggtgggaggcgtagagggaaaaaggaacgatataatcgggttttttagtcgttggcggattcgatggggcgttttgcgagggttcggcgagggttttgttaggatagtagtattgcgtttaaggagtgagaggtattcggggttattggagttagatttttaattcgttttagtgggaggcgaagaataacgaaagtttcgtatttttatttttttaatggttaatgatattaaaggtttttatatggttatttgttatttgtatatttttagtgaagtgtttgtttatgttttttgattattttttaattggatttttaaaaataattgatttttgagttatttatatattttagatattggttgtatgttagatatatggtttgtaaatatttttttttaggtaaatttttttagtatcgttatagggttttttataaagtaaaagttttaaatttatggagtttaatttattaatatttttttttatcggttttgttattaatgttaatttaagaattttttgtttagttttagataatagtttgttgttttttaaaatcgttttgtaattttattcgttatagttatatttagttatttaatttttatgtaagggttatttttggcgggggggaatttatagatgttttgtttttttagtattatttgtggaaaagattatttgttttgtattaaattgtttttggattttcgtttaaaattagttggatcggtttttgttggtaaagttttgtttgaagtttattttaataggtgagaaaaagtttatagtttaatagtttttttttaatttgtaatttcgttttgaatttttggattagtttttcgattgttgtagatgttaagcggatttcgcgtcgttttgcgttgggttagttttttatagttggttttttattacgtattgcgtaagcggaatttatgtttgttatttatattttttgcgttttcgtatttcgtttttgtgcgtaagtcggaatataaaatcgcggaggagtgagtttttggggtgtttagttggttgtcgcggtagttttttcgagtagcgtatttgttttttaggttgtttggttcgtgttttcgagaaaggtaagtttttttttcgtttttttaggggtatttgaaaataataagtgttagataaagtagtagatgttgttgcgtagtagaagtttatgggcgagttgtttttgaaattggaattaggttttttttggcgcgattacgtaagaattattcgtagttttgcgggtttttggtaggttttgtaattgtattttggatagtttcgttgggaagttagtattttttaatatagaagaacgaggtttgataagtgtgcgagtttaaaggttgatatagtgtttattattatagttgcgtaggtagttagtgtttaggaagtaatagtggagttatgtagtgtgaaagtaagattgaaatgggcgaggagggtagtagtcgttatagttattagagagaaatttgattttgtaggtgcgtggtgatgtttatgagttaggttggtgtcgtaatagtagcggcgggattttgagtttcgtacggtcgttgggtttggacgttttttggtttttggaaatttttattttttttttagtttgaggttaggtggtttgggaaggtggaaggagtgtggaggggagtgggggggggggtttattgtttgagaatgagaattttttttatatttggaaattttagttattacgtgtgttttttattaatttttttttttttattttttttttgatagagacggcggtttttttatgttatttaggttagttttgaatttttgtgtttaagcgatttttttattttgattttttaaagtgttggaattataggtatgagttaatgcgttcggttgttttattaattttttatgaatgaatttgtatatatattttttagagtaggaagtaatgtaaaatagaataattagtaatgtatattttttaatgtgggatgttggtggttaagagatatttggtttttattggaatttttgatattaatatggagtttataatagttgtggagagtgtagataaggttaggatttttgtgattagagaatttttagtgcgtgaagatttaaggaaagttggattgttgatttttgttaataaataagatgtgaaagattgtattattgtagtagaaattttttagttttttaagttaaattttattaaaggttattattgttaaaggaattgtgtttaggatttggatagttgatgttattatttaatattagatgatattaattaattatattttatagattggaataaagtgttagattttatttgaaagttgtaaaaatgaatggtttagatatatgtatgtatttattttatattaattttaaatatttattgtattaatttttttggttttttttaattaagaatataaaattatttatttaaattttgttatttaagtttagaatatttttagaattatattattttaaagaagttagattagaattagaagtaagttaagtttgaagatataataattagtaataatattttttttttttaaatgaaaattttaatatggggtgggtatgttgtgttatatttgtaattttaatattttgggaggttgatgtaggaggattatttgaatataggagtttaagattagtttggataatatagtaaaattttgtttttataaaaaataagaaaattagttgggtatggtgttatatgtttgtagttttagttattcgggaggttgaggtgagaggattgattgattttaggaggttgaggttgtagtgagttatgatcgtatgattgtattttaatttgagggatagagtaagattttgatttaaaaaaaaaaaataaaaaaaaaaaaattattattaaaattttaatatggatatattatttttttatgggatttgtatattttaaaaagggtttttttttttagtattgggagagtatgtgtttaattacgtagttagtaagataggttagtttatatagggagtgtgttatttataaaaagttttttttttttttttggtattgtatatgatataattatagttgtatttgaagagaagtgtattttaaggattattattatttagaaatatgtataaatttttatatttagtgttataggaatgatattgttttgtattatttttatttttgtttagaggttagttatgtggtttgtttgtatggtgtttagaattttttttatttgatttaggatgtttttgaagtagtttttttgggtagttgtttggtatttaggatatatttgtgagaaaagttttttataaatttaatttattatgtttatttttgaatttaaaaagtttattgattgtttaaattttgaaattttttttatttttataaggttgaattaaaagtattttgttaaaggtagtagttatggtaaaagaaaaattattgttttgtagaaaaatttatttaatatttataattttttttaattagagattagattttgaagagaaaggtttatatatatatatatatatatatatatatatatatttttttttttttttttttttttttttttttattttattgttattgtgattaaggatttatgaattaagattttttttttagtttttggtggtatatggtgatagtatgtttagagtaaaggtgttttttatgttttttttggggttgtattgattgtaggtattttttttttttatattttatattattgatattaaaaattttttttttttttttgtattgatgattttgtagttttaattagggcggcggtgttattttaaatgttattttggtatttagttttatagagtggggaaaatttttttatttgtttttttttgattgtttagttttttttaattaaaattttaattttataagcgaggaaatgagagtgttttttgtaggggtgtagtgagaatttaataaaatagtttaaggaaagaaaataaaaggtagtattgttgtattttttagatggtaaaaagtaaattattatgtttgtttaatatatattatttgttggtttttcggtttagtaggttgaattgtgtgtttgggaatttttttttcgttgtgtgtatttttttacgttatagggtggattttttttagagttttagtggagtagttggttaggttgatatgatttgataatattgtaggttattattattattttttatcgttttattttttttttagg

SEQ ID NO: 106 - DNA, 5269 bp, Artificial Sequence
  chemically treated genomic DNA (Homo sapiens)
  unsure (4810): unknown base
tttaggaagaaagtgagacggtgagagatggtagtggtaatttataatgttgttagattatgttagtttggttagttgttttattaggattttgaagagagtttattttgtgacgtaaaggggtgtatatagcgagaagaaaatttttaggtatatagtttagtttgttagatcgagggattagtaggtgatatatattaaatagatatggtggtttgttttttattatttagaaagtgtagtaatattattttttgttttttttttttaaattgttttattaaatttttattatatttttataagaaatatttttattttttcgtttgtaaaattaagattttaattgaagaggattgaatagttaaagagaaataggtgagggaattttttttattttatggggttgaatgttaaggtgatatttagagtgatatcgtcgttttggttaaagttatagagttattagtataggagaaaggagggggtttttggtattagtggtgtgggatgtagagaggggaggtatttgtagttagtgtagttttagaagaggtatggggagtatttttgttttgagtatgttgttattatgtgttattaagagttgagggaggggttttagtttatgaatttttagttataatgatagtggagtaaaaaaaaaaaaaaaaaaaaaaaaaaaaaaatatatatatatatatatatatatatatatatatgaatttttttttttaggatttaatttttgattagaaaagattgtaaatattgaatgagtttttttatagaatagtggttttttttttgttatggttattatttttaataaagtatttttaatttagttttatggaaatagagaaaattttaggatttgaatagttaatgaattttttgagtttaggaataaatatagtagattaggtttgtaagaaattttttttataggtatattttaaatattagatagttgtttagggggattgttttagaagtattttaggttagatggaaaaagttttaggtattatgtagatagattatatagttggtttttggatagaggtaggaatagtataaggtaatgttatttttgtggtattaggtatagaaatttatatatgtttttaggtgatgatggtttttaaaatgtatttttttttaggtatagttatgattgtgttatgtataatattagaaagagaagagaggttttttgtgaatagtatattttttatataaattagtttgttttgttggttgcgtagttgaatatatatttttttagtattggggaaaaggattttttttagaatgtgtaagttttatgagagagtaatatgtttatattagagttttggtggtggtttttttttttttgttttttttttttgagttagggttttgttttgttttttaggttggagtgtagttatgcgattatgatttattgtagttttaattttttgggattaattaatttttttattttagtttttcgagtagttgggattataggtatgtgatattatgtttagttaatttttttattttttgtagggatagggttttgttatgttgtttaggttggttttgaatttttgtgtttaagtgatttttttgtattagttttttaaagtgttgggattataggtgtgatataatatatttattttatattagagtttttatttgaaaaaaaaaaatgttgttgttggttgttatatttttagatttaatttgtttttaattttagtttggtttttttaagatagtgtgattttaagagtgttttaaatttaagtggtaaaatttaagtagatgattttatatttttgattaaagggggttagggaggttaatatagtaaatatttgaaattgatataaaataaatatatatatatatttaaattatttatttttgtagtttttaggtaaaatttagtattttattttagtttatgagatgtggttagttgatattatttaatattaagtaatgatattagttatttaaattttgggtataatttttttagtaatgatgatttttaatagaatttagtttaaaaaattaggagatttttgttatagtgatgtaattttttatattttatttattaataaaaattaataatttagttttttttaggtttttacgtattaagagttttttagttatagaaattttagttttgtttgtattttttataattattataaattttatgttagtattaagagttttagtaaagattaaatattttttggttattaatattttatattaggaaatgtgtattattaattattttgttttatattattttttgttttaggggatgtatgtataaatttatttatagaaaattggtaaagtagtcgggcgtattggtttatgtttgtaattttagtattttgggaagttaaggtgggaggatcgtttaagtataggagtttaagattagtttgggtaatatagggagatcgtcgtttttattaaaaagaaaataaaagaaaaaaaattggtaaaggatatacgtgataattgaagtttttagatgtgaagagaatttttatttttaggtagtggatttttttttttatttttttttatattttttttatttttttaggttatttggttttaggttgagggggaggtgaaagtttttaggaattagagggcgtttaaatttagcggtcgtgcggagtttaaggtttcgtcgttgttgttgcggtattagtttggtttatggatattattacgtatttgtaaggttaggtttttttttggtggttgtggcggttgttatttttttcgtttattttaattttatttttatattatatgattttattattattttttgaatattagttatttacgtagttgtaatagtggatattgtgttaatttttaagttcgtatatttattaaatttcgtttttttatattaaaaagtgttagttttttaacgggattatttaaagtgtagttgtaggatttgttaggagttcgtagggttgcgggtggtttttgcgtaatcgcgttaagaaagatttggttttagttttagggataattcgtttataaatttttattgcgtaatagtatttgttgttttgtttgatatttgttgtttttaagtatttttaaaaaagcgaaagaaagatttatttttttcggaggtacgaattaagtagtttagaagataaatgcgttgttcggagagattgtcgcggtaattaattggatattttaagagtttattttttcgcggttttatatttcgatttgcgtataggagcggggtgcgggggcgtagggagtgtgggtaataggtatagatttcgtttgcgtaatacgtggtaagaaattagttgtgaggggttggtttaacgtagagcggcgcgaggttcgtttggtatttataataatcgaggggttagtttagaagtttaaggcggggttataggttggggaggaattgttaaattgtggatttttttttatttgttggaataagttttaggtaaaattttgttaataaaaatcggtttaattgattttagacgaaagtttaaaagtagtttaatgtaggatagataattttttttataaatgatattgaaaagataggatatttatagattttttttcgttaaaaataatttttatataaaaattaagtggttagatataattgtgacgagtaaaattataaaacggttttaaaaaataataaattattgtttaaggttaggtaaaaggtttttaaattgatattagtggtaagatcggtaaaaagaaatgttgatgaattagattttataaatttaaaatttttgttttgtgaaagattttgtaacgatattgaaaaggtttatttaggagaaaatatttataagttatatatttggtatataattagtatttagaatatgtaaataatttaaaaattaattatttttaaaaatttaattagaaaatagttagaagatataaatagatattttattgaagatatgtagatggtaaataattatatgaaaatttttaatgttattagttattagagaaatgggaatacgaggttttcgttgtttttcgttttttattagggcgggttgagggtttggttttagtagtttcgggtgttttttattttttgggcgtaatgttattattttggtagaattttcgtcgaattttcgtaggacgttttatcgggttcgttagcggttaggaagttcgattgtgtcgtttttttttttttttgcgttttttatcgttagttttttttttaaatgcgtttgcgtttgttttttatattttcgagtttcgtttggttttttttttttttgtttgtgagcgtttggcggcggatgtattgaaagttgcgtattatcgtttatcgagcgttttggggagtgtgtggaagttgttggtagtaggttttgatagtagtattttatgggtttagtcgttgacggtagtatttggttttgtgtgttttagttagttgaggttagggtgtgtggtgtgggttattggtattgtttttttgttattataatttttttttttattaggtatttggtgcgtagaagtttaaagatttgtgaggtttagtttggcgtttgtaattttagagaataaggaggttgaggttaggagttagagattagtttgggtaatatggggagaatttgtttttattttaaaaaaatttagtttagtgtggtggtggtcgtttgtagttttagttatttgggaggttgatgtgggaggattatttganttttttatattaaggagatcgaggttgtagtgagtcgtgattatagttattgtattttaatttgagtaataaagtgagaatttgttttaaaataaattttaatttgattttggtatagtattatatgataggtagtagttttaagggcgattaaagtattttattttaaaatatatttttgatatattttggaatggttttgtgtaaagttattttttgcgagggaaatttgtgttttgtggataatttttttttttttttaggtttttttttgattcgggagagatttaattaagagtttgatatcgtttaaggttatttattttttgaggtatatatgttatttattttttttgaagtatattataggttttatatatgtaataagaattttggtttttataattttttttttgttattattggttaaatttttttttttttaaaatgtatcggttt

SEQ ID NO: 107 - DNA, 4558 bp, Artificial Sequence
  chemically treated genomic DNA (Homo sapiens)
taattttaggtgattagttagtttcggttttttaaagtgttgggattataggcgtgagttatcgtgttcgattaattttttttttttttttttgagacggagttttattttgttatttaggttggagtgtagtggcgtgatttcggtttattgtaagttttgttttttgagtttacgttatttttttgttttagttttttatgtagttgggattataggcgtttgttattatgttcggttaatttttttgtatttttagtagagacggggttttattatgttagttaggatggttttaattttttgattttaggtgatttatttgttttggttttttttttgtgtatttttaaaagagacggggtttcgttatgttaggtaagttggttttgaatttttgattttaggtgatttgtttgtttcgggtttttaaagtgttgggatgggattataggcgtgagttatcgtgttcggttttttttttttttttttttttttttttagagatagattttttttttgttgttttggtgtaattatagtttattgtagtttcgattttttgggtttaagtaatttttttattttagtttttttagtagttaagattataggtatataatattatgttttgttaattttttttttttttttttttttttttggtataagtagggtattgttgttgtttaggttggtttggaatttttgtatttggttttaagcgatttttttgttttggttttttaaatggttgggatgggattttaggcgtgatatatcgtagttggttgttttttttgttgttgttgagataaggttttgttttgttgtttagggcggaatgtagtggtgtaaatatggtttattgtggtttcgattttttgtgtttaggtgatttttttgttttagttttttaggtagttgggattattaaatgtataggtgtgtattattatatttagttaatttttaatttttttttgtagagatatggttttattttgttgtttaggttggttttgaatttttgggtttaagtaatttttttattttagttttttaaagtgttgggattataggcgtgagttattgggtttagtttttattgagttttaattttcgtttatttgattattatttttaggattttaaatatttagagattattaaggtgtatggtgtataggtttaaattgtaggttgaattttaatttagtattagtattttttaatgcgattatagaattgattattattatttattttttttgagatggagttttgtattgttattagggttggagtgtaatggcgtaattttggtttattgtaatttttattttttaggtttaagggatttttttgttttagttttttaattagttgggattataggcgttcgttattatatttagttaattttttgtatttttagtagagacggggttttattatgttagttagaatggtttcgattttttgatttcgtgatttgtttgttttagttttttaaggtgttgggattataggcgtgagttatcgcgtttggtttagaattgatgattaatttagttgagtttttgtttatttgaatgggtattgttaatagtatttatttataagagttgttgagaagatttaatgagataaatagttgttaaagtgttaggtatgtagtagtgtttaagaaattttttattttgggttttttattggtattgattgatgtagaggtgggggagaagattaaagataaggattgagaattagggatgggaaaagtagtgggttattgatagtcgttttgtttgtttgggaggtggggtggggaaagtgggcgggatatgtttttgggtttggtttatttagattattttataggttgtcggtttgtgcgtttgtattcggtggttatagagtaattttttttagagggagttgattggagtcgggtgtcgttggtatttttatgattattggagtttcgcgggtttttcgggttgtatagggataagtaaaggttatatttagatgtcgggaatgtattgacgtttatttttggaaattgggtttttatttagtttttgggagtagtagtcgttagtttttcgggatttttatttttattttgttgagttattcgggttgggttaggatttcggtaggtaagttggaagggttttgtttatttttttagattttagtagttttagttttagggtggggtagggagtttgtcgggagtcgggtggggaaggggaagtttaaggtttttttgggtaggtttgtcgtttcggttggggatttgattttgttatgtttgtttttggttgttttttatagtttttttttttggtttagttttggatgtcggagaattgtaagaattgggttttttaatagtttgggagatgggagtggaggttagagttaaggttaagggtagagagagaatttttttagcgtttgttgttgtttaatatttttagattgggtttagggtttggttaggtatgtatttttgggtaatatttatcggggtttagtaagtttaggaagtcgggggtggttttttttatcgggaatttaggttatttggatgggggaggtagagttaggtttgagttagtataggttgttggttttggtgggtgttttgaggttttatttgtttttttcggaagtttggggtgttggtagagggagttggaggtgtagttagtattttttagttttattgttttgggggtgtcgggttttggagattggggaagaaggaaggttattttatgtaaggagttacggggggtgggaggtaagtaaaattttttttttttgttttttgaaatggagtttcgttttgttgtttaggttggagtgtagtggcgtaatttcggttgatcgtaattttcgtttttaaggtttaagcgatttttttgttttagtttttcgagtagttgggattataggcgtacgttattatgtttagttaatttttgtatttttagtagagatggggttttattatgttggttaagttggttttgaatttttgatttcgtgggttattatgttcggttgtaaagttttgttttaataaggttttgtttttagaggtggaggagaggaaggtttgtttttattttgtttttgttcggtagatcgaggaggagtggggagttgggtgagggtataggtggtttagtttttttttatttttttttgagagtttttggggtattttcgaaaatatttttaggtttagcggaaggagggtgggcgaaggtttttaggttttgggcggtgggggtggggttgtgtgtttggtttagggtggggttgtatattttttttttttgggataggaggagggcgttttttttttgagggttggaggttgtttggggaaatggggttttgggaggggtgtaaattgaaagtgaaatagttgatatttaggaaatattcgttttgatgaggggttatagtaggttggggttgcggttaggattaggtaaagaggaaaattggggtcggggatagaagattaggtgtgtggtgggagtacgaggtaggttatggggttttaaagaaggttttgattttgagggtttttttcggttattgtaaggtagtagtggggaaggtatagataggaggtaaatagggaaagttgttttgagaaagaatatattttgaggtttataaattggaaaagaaattttgtatgcgtgttgagtatatggatttacggagatttagataaataatttgatttttcgtgattaacgatgtgatttcgggtatttaattttttgtgttttattttttttgtttgtaaagtgggtatgatggcgtttattttgttgggtttatgtgagtttttagtgtttattatttatagagtgtttttaagtgggagagtatattttaggtttttaggaaatgtttgcggttaatagtttagagttaaaaaataggtgtgttttggttagttagagggaagtagggtttttgaggatagtttttatgggttattggttgggtagtggttcgtttgtaataagtatgtgttgggtgggttgtaggaggttttaggaatagttaaaaattttttaggtttttgttttaggagtggtatgaatttgagagttagcgggtattgttgtagttatatttttttcgatggtgtagatattttagtttgtttttggttgttttatttttttattttgttttttttaaagagggagtgtttagtaagttgtttttttttagtagattttattgggatttatgttggagtaagaataaaaagttttagaggaggttaggtacggtggtttatatttgtaattttagtattgtggatggtcgaggtagatttacgaggttaggagtttgagatcggtttggttaaagttttagaggattaagggtttttttgggaatgggggatttttttttttatgtggatatggtaatttgtatggggtttttagttataggtttgtgtttatttttatttttgttttttttcgttttttttcgtagg

SEQ ID NO: 108 - DNA, 4558 bp, Artificial Sequence
  chemically treated genomic DNA (Homo sapiens)
tttgcggggaagggcgagaaaaagtagagatgggggtgagtatagatttgtgattggggattttatataggttgttatgtttatataggagagaggattttttatttttagaaaggtttttagttttttgggattttggttaggtcggttttaaatttttgatttcgtgagtttgtttcggttatttatagtgttgggattataggtgtgagttatcgtgtttggttttttttgggattttttatttttattttagtatgggttttagtgaagtttgttgggaggaaataatttattgaatattttttttttgagggagatagggtaagaaggtgaggtagttaagggtagattgaggtatttgtattatcgaggagggtgtggttgtagtagtgttcgttggtttttaagtttatgttatttttggggtaagagtttggggggtttttagttgtttttggggttttttgtagtttatttagtatatgtttattgtaagcgagttattgtttagttaatggtttatgaaggttgtttttagaggttttatttttttttggttggttagaatatatttgttttttaattttgggttgttagtcgtaaatattttttgagagtttaagatatatttttttatttaggagtattttgtgggtggtgaatattggaaatttatatgaatttagtagggtgagcgttattatatttattttataggtaggaaaagtgaggtataaagagttgagtgttcgaggttatatcgttagttacggaaagttaggttgtttgtttgaattttcgtgagtttatgtatttaatacgtatgtaagattttttttttagtttgtggattttagagtgtgtttttttttagggtaattttttttatttattttttgtttgtgttttttttattgttgttttgtagtgatcggagggagtttttaggattagggttttttttgaagttttataatttgtttcgtatttttattatatatttggttttttgttttcggttttaatttttttttttgtttggttttgatcgtagttttaatttgttgtgattttttattagggcgagtgttttttggatgttagttgttttatttttagtttgtattttttttagagttttatttttttaggtagtttttagtttttagaaggagagcgttttttttttattttagagggagggggtgtgtagttttattttgggttaagtatatagttttatttttatcgtttagggtttggggattttcgtttatttttttttcgttaggtttgggagtgttttcgaaagtgttttaagagtttttaagaaggggtggaggagggttggattatttgtgtttttatttagttttttattttttttcgatttgtcggatagggatagggtgaaggtagattttttttttttttatttttaggggtaaggttttgttaaaatagaattttgtagtcgggtatagtggtttacgaggttagaagtttaagattagtttggttaatataatgaaattttatttttattaaaaatataaaaattagttgggtatggtggcgtgcgtttgtagttttagttattcgggaggttgaggtaggagaatcgtttgaattttggaggcggaggttgcggttagtcgagattgcgttattgtattttagtttgggtaatagagcgagattttattttaaaaaataaaaaaaaagagttttgtttgttttttatttttcgtagttttttatataagatggtttttttttttttttagtttttaggattcggtatttttaggatagtagggttggaggatgttgattgtatttttaattttttttattaatattttaggttttcgaggggagtaggtagagttttagaatatttattaaggttagtaatttatgttgatttaggtttagttttgttttttttatttaagtggtttaaattttcggtgaggggagttattttcgattttttgggtttgttgggtttcgatgaatgttgtttagggatatatgtttggttaggttttggatttagtttagggatgttgggtagtagtaagcgttgagaaagttttttttttgtttttgattttggttttgatttttatttttattttttagattgttaaaggatttagtttttatagtttttcggtatttagggttgggttaagaggggaagttgtgaggggtagttagaggtaggtatggtaggattaggtttttagtcggggcggtagatttgtttagggaagttttgagtttttttttttttattcggttttcggtaggttttttgttttattttggggttggggttgttgagatttgggaggatggataagatttttttagtttatttgtcgggattttggtttaattcgggtggtttagtagggtggagatggaggtttcgaggggttggcggttgttgtttttaggggttgagtgggagtttagtttttaggaatgggcgttagtgtattttcggtatttggatgtagtttttatttgtttttgtgtagttcgagggattcgcgagattttagtgattatagaggtgttagcggtattcggttttaattagttttttttagaggaagttgttttgtggttatcggatgtagacgtataggtcgatagtttgtagggtgatttgggtgggttaggtttaggagtatgtttcgtttattttttttattttattttttaggtaggtagggcggttgttagtggtttattgttttttttatttttgatttttaatttttgtttttgatttttttttttatttttatattaattaatattaataaaaaatttagggtgagaagttttttaagtattgttgtatgtttggtattttagtaattatttgttttattggatttttttagtaatttttgtaagtgagtgttgttgataatatttatttagatgaatagaggtttagttgggttaattattagttttgggttaggcgcggtggtttacgtttataattttagtattttgggaggttgaggtaggtagattacgaggttaagagatcgagattattttggttaatatggtgaaatttcgtttttattaaaaatataaaaaattagttgggtgtggtggcgggcgtttgtaattttagttagttggaaggttgaggtaggagaattttttgaatttgggaggtggaggttgtagtaaattaggattgcgttattgtattttagttttggtgatagtgtaagattttattttaaaaaaaataaatagtaataattagttttgtagtcgtattggggaatattaatattagattgagatttaatttgtaatttagatttgtgtattatgtattttggtggtttttggatgtttgaaattttgaaggtgatagttaagtaaacggagattaaaatttaatagaggttgggtttagtggtttacgtttgtaattttaatattttggaaggttgaggtgggaggattgtttgagtttaggagtttaagattagtttgggtaataaagtgagattatgtttttataaaaaaaaattagaaattagttgggtatggtagtgtatatttgtgtatttggtggttttagttatttaggaggttgaggtaggaggattatttgagtataggaagtcgaggttatagtgagttatgtttgtattattgtatttcgttttgggtaatagagtaagattttgttttaataataataaaaaaggtagttagttgcggtgtgttacgtttagaattttattttagttatttgggaggttaaggtaagaggatcgtttgaggttaggtgtaggagttttaggttagtttgggtaatagtaatattttgtttatattaaaaaaaaaaaaaaaaaaaaaaaaaattagtaaggtatggtgttgtatgtttgtggttttagttattggggaggttgaggtgggaggattgtttgagtttaggaggtcgaggttgtagtaagttatgattgtattagggtaatagagggagagtttgtttttagaaaaaaaaaaaaaaaaaaaaaaaaggtcgggtacggtggtttacgtttgtaattttattttagtattttgggagttcgaggtaggtagattatttgaggttaggagtttaagattagtttgtttaatatggcgaaatttcgttttttttaaaaatatataaaagggaggttaaggtaggtggattatttgaggttaggagattgagattattttggttaatatggtgaaatttcgtttttattaaaaatataaaaaaattagtcgggtatggtggtaggcgtttgtagttttagttatatgggaggttgaggtaggagaatggcgtgaatttaggaggtagagtttgtagtgagtcgagattacgttattgtattttagtttgggtgatagaatgagatttcgttttaaaaaaaaaaaaaaaaaattggtcgggtacggtggtttacgtttgtaattttagtattttgggaggtcgaggttggttgattatttgaggttg

SEQ ID NO: 109 - DNA, 5518 bp, Artificial Sequence
  chemically treated genomic DNA (Homo sapiens)
gtataaattatatttttaagagtggggagaatattgtaaagtatttttttaagtggggtggaggggagaatatattatattagttagagtggggtaggaataaattattatggtggaatgttattagttaaggttatttttattttttttgtggatttttagttgttttcggttatttggatgtgtacgtgtaggttataggggatatgacggtttagtttgggtttagaggtttgatatttattatatggtagttggttttttttaaaggaagtgatttgaaagggaataaggtggaagttgtagtggtttttttgatttgttttgtgaaattatattttgttatttttataatatttttttggttatattgtttagttttattgagtgtgggtagagattatatagtagtatgaatatttggaggtgtgattttttaggtgttattttggatgtgggtttaatagttttgatttagtatttttattattataaagagtttggttgggtgcggtggtttacgtttgtaattttagtattttgggaggttaaggcgggcggattatgagggtaagagatcgagattattttggttaatatggtaaaagtttatttttaataaaaatattaaaattagtagggcgttgttatacgtttatagttttagttatttaggaggttgaggtaggagaattatttgaattcggaggcggaggttgtagtgaattgagattatattattgtattttagtttggcgatagagtaagatttcgttttaaaaaataaaataaagtaaaataaaataaaatatataaaaaagagttttagttaggtatagtgacgtatgtttgtagttttagtattgtgggaaattgaggtaggtggtttatttgagtttaggggtttgagattagtttgggtaatatggtaaaattttttttttataaaatatataaaattagtagtgtatagtggtatatacgtgtagttttagttattttagaagttgaggtgggaggattttttgagtttaggaggtcgaggtggtagtgagttatagttgtgttattgtattttagtttggacgatagagggagattttgttttaaaataaataaataaaaataaaaataaatagttttgattttataattagttaaaaagtgtatttttttatttagtgattgtattgtttagaggtgtatatttgtattaaaagttttttttttttttttttgtaattggagtagggaagggttattttttgttatgattggaagttttttgaggtttttttagaagtagaagtttgtgttatatttgttgtatatagtttgtagaattatgagttaattaaattttattttttttttttttgagatgaagtttcgttttgttattcgaggtggagtgtaatggtacgatttttgtttattgtagtttttgttttttgggtttaagtgattttttggttttagttttttaagtagttgggattataggagtatattagtacgtttagttaatttttgtatttttagtagagatagggttttattatgttggttaggttggttttaaatttttgattttaggtgatttgtttgttttggttttttaaagtggtgggattttaggtgtgagttattacgttggttaaggatatggttttttatagagattttgttttttaaatttataaattgttggaaattttattagtaaaaatgaaatattcgagttttgttgataggatttaatttatttgatatagagtagtagttttgatttttaaagtaggtgtatagttttagataaagggtttttggatgtaatattttatatgtatttttttgtttttagcgatttaggatattggttttattttatagttttgatttaatgttgattttgttttgttttaagttattatttggttgttatttaagttttattttttttttttattttggttttttttttttttttttttttttgagataggttttttttttgttatttagtttgattgtagtgatgtaattgattatagtttacggtagtcgggattttttaagtttaaataatttttttattttagttttttaagtagttgggattataggtacgtattattatatttagttaatttttttttttttttgtttttttttttttttgtttttttttagatagaggtttgttttgttgtttaggttggggtgtagtggtacgattttggtttattgtaatttttgttttttgggtttaagcgatttttttgttttagttttttaagtagttgggattgtaggtacgcgttattatttttagttaatttttttgtatttttagtggagacggggtttcgttatgttggttaggttggttataaatttttgattttagatgatatatttatttcggttttttatatagttggtattataggtgtgagttattacgttcggttttttttttttttttttgttttttagttgatatagggttttattatggtatagtttaggttggttttgaatttttggttttaggtgatttttttgttttggttttttaaagtgttgggattataggaatgagttattatatttggtttttttttttaatttttaaaataaattgattttttaaggttaagaggaaatattttttttgagaagttttttttgaatgttagaggtagataatgtttgatttttgtatgttttttaatatttaattatatagttattgaataatatattttgagagataattatgaattaagtaatatgttggtttttgggagaattgaggataaattaattttgtggaaattttgggtggatgaaaaaaattaatatgaaattaaaatattgtatatatttatagttgtgagaagtattatatattttgggtgttatgcgagttttttttttttttttttttttttttgagttggagttttttttttgttattgaggttggagtgtaaggttacgattttagtttattgtaatttttgtttttagatttaaacgatttttttgttttagttttcgagtagttgggattataggtgtttgttattatatttggttaatttagaatttttagtagggatagggttttatcgtgttggttaggttggttttaaatttttgattttaggtgatttatttatttcggttttttaaagtgttgggattatagaagtgagttattgagtttaattaggagttttttcgagaaagaaggaagtttaagagatttttttgatattttagtttgattttgttttttgtttgtttaaaatttttttatgttttttagcggttttttggatatagattaagttttttttttgataggtttaaattttttattatttgattttagtttatttttttgagttttttttagttgttattattttttgtttaaagtgatatgttataatatttataaagtatataagttttatgtgtatagtttaatgaattgtaaatatgtgtatattcggtcgggtatagtggtttacgtttgtaattttagtattttgggaggtcgaggtaggtggattatttgaggttaggagtttgagattagtttgattaatatagtgaaattttatttttattaaaaatataaaattagttgggcgtggtgtcgtatgtttgtaattttagttatttgggaggttgaggtaggagaattgtttgaattcggaggtagaggttgtagtaagtcgagatcgtgttattgtattttattttgggtaataagagtaaaatttcgttttaaaataataataataataataataataataataataataatgtgtatatttatgtaaatattatttagataaaaatatggtatatttggggtattcggggagtgttttttgtggttttttttttttatattttgttgatttattagtatagattagtttttgttattttttaaattttatattttttttttttttatataaatataaatattcgagttatgattgggtggggtggtttaagtttgtaattttagtattttgggaggttaaggtgcgaggatcgtttgagtttgggagtttagagattagtttgggtaatatagagagattttatttttatataaaaagttttaaaaattaattaggggcggtgtagttttagttatttaggaggttgaggtgggaggttttagttcgggaattttagattgtagtgagttatgattgggttattgtattttagtttgggtaatatagtgagattttgttttaaaaaaaaaaaaaaaaaaaataggaaaaaataaataaatagaaaagtaggtttggcgcggtagtttatgtttgtaattttagcgttttggaaggttgagacggggttattttttgggtttataagttagagataagtttgggcgtgggttatattgttagatttaggtttttgtaaaaaataaaattatttagtttttagttatttataacgttttgtttggaagtatgttattttgggtttttgagtttttgtatttgttaattttttttgcgttggggagagtttaaattttgttcgaaatttttaaaaatggtgtttggataaatgaaggtattagagttgcgattggacggacggttgttggacggcgttattgttggtatttatcgggagatgtttattggatagttacgtgacgggattaaatttttcgagggagcgaggtaggtgcggttacgtgattcggcggcgttgcggggtagcggttattttgcggggcggttacgtgaaggacgtacgtttagcggggtttttacgtgattcgggcgcgttgcggtcgttcgcgcggattcggcgagaggcggcggcgggagcggcggtgatggacgggttcggggagtagtttagaggcgggggtgaggcgggaggtagacgggcgggaggagggcgagttttttcgtcggttcgttcgggattttttttatcggtttggggttgtgcgatttttaagtattgaggggtagaaattttcggatcgggcgttgttagtttttagtttttttcgttttcggaggtttttggttttttgattttcgtgtttcgatttttgtttttttggcgttttcggattttcgagaattaggggatttcggaagttaagttttcgggtaggttcgggtttgtcgttcgtattattttttgtttttggtattggtgggaggggcgggtttcgtttttgtttttttaggttaggggtttggatgtatatagcgtttttttagttttttttttcggggagaatgtaggatataggtttagttttttggtttttttttattagggatttagttgtttgggttttttcgttattttatttgttagggttttagaagtttagggttttagttttgtttttttttagggtcgtgagtttttatagttttttgattttttagaatttaagagtttaggtatttttttttttttttttttttttagg

SEQ ID NO: 110 - DNA, 5518 bp, Artificial Sequence
  chemically treated genomic DNA (Homo sapiens)
tttagaggagaaaggaagggaagaggtatttggatttttgggttttaggggattaggagattgtggagatttacggttttgagggaggatagagttgggattttggatttttgggattttagtagataaagtgacgggggggtttagataattgagtttttgatggagaaaggttaggaggttgggtttgtattttatatttttttcggggaaagaggttaggggaacgttatatgtatttagatttttggtttgagggggtagaggcgagattcgttttttttattagtgttagaggtaggaagtggtgcgggcgataagttcgggtttgttcgggggtttggttttcgagattttttggttttcgagggttcgagagcgttagagaggtagggatcgggatacggggattagagagttaggaattttcgaggacggaggggattggaggttggtagcgttcgattcgggagtttttgttttttagtgtttggagatcgtatagttttaggtcggtaggaaggatttcggacgggtcggcgagggggttcgtttttttttcgttcgtttgtttttcgttttattttcgtttttgggttgtttttcggattcgtttattatcgtcgttttcgtcgtcgtttttcgtcgggttcgcgcgggcggtcgtagcgcgttcgggttacgtgagagtttcgttgaacgtgcgttttttacgtggtcgtttcgtaaaatggtcgttgtttcgtagcgtcgtcgggttacgtgatcgtatttgtttcgttttttcgggaggtttggtttcgttacgtgattgtttaatgagtatttttcgataagtgttagtagtggcgtcgtttaatagtcgttcgtttaatcgtagttttaatgtttttatttatttaggtattatttttagaagtttcgggtagggtttgagttttttttagcgtagaaggaattagtaagtgtaaaagtttagaggtttaaaatagtatgtttttaggtaggacgttatagatgattaaaaattgagtggttttgttttttgtagagatttggatttagtaatatagtttacgtttaggtttgtttttaatttgtgagtttaagagataatttcgttttagttttttaaagcgttgggattataggtatgagttatcgcgttaggtttgtttttttgtttgtttgtttttttttgttttttttttttttttttttgagatagggttttattgtgttgtttaggttggagtgtagtggtttaattatggtttattgtagtttggaattttcgggttgaagttttttattttagttttttgagtagttgggattatatcgtttttggttaatttttaaaattttttatgtggagatgaggtttttttatgttgtttaggttggtttttgaatttttagatttaagcgattttcgtattttggttttttaaagtgttgagattataggtttgagttattttatttagttatgattcgaatgtttgtgtttgtgtaaaaagaaaaggaatatgaagtttaaaaagtggtagaaattaatttgtgttgatagattagtagggtatggaggggaggggttataagagatatttttcgggtgttttaaatatgttatatttttatttgaatggtgtttatatgggtatatatattattattattattattattattattattattattattttgagacggagttttgtttttgttgtttaggatggagtgtaatggtacgatttcggtttattgtaatttttgttttcgggtttaagtaatttttttgttttagttttttaagtagttggaattgtaggtatgcgatattacgtttagttaattttgtatttttagtaaagatggggttttattatgttggttaggttggttttaagtttttgattttaagtgatttatttgtttcggttttttaaagtgttgggattataggcgtgagttattgtgttcggtcgggtatatatatatttataatttattgagttgtatatataagatttgtgtgttttatgaatattatgatatgttattttagatagaaaataatagtaattaaggaaaatttagaaaaatgagttaggattagatgataaagggtttgggtttgttagagaagggatttgatttatgtttagaaggtcgttgggaagtatggggaaattttgagtaggtaaagggtagagttagattagggtgttaggaagattttttggatttttttttttttcgaaaaagtttttggttgggtttagtggtttatttttgtaattttagtattttgggaggtcgagatgggtagattatttgaggttaggagtttgagattagtttggttaatacggtgaaattttatttttattaaaaattttaaattagttaggtgtggtggtaggtatttgtagttttagttattcgggagttgaggtaggggaatcgtttgaatttggaggtagaggttgtagtgagttgagatcgtgattttgtattttagttttagtaataagagggaaattttaatttaaaaaaaaaaaaaaaaaaaaaaaaagttcgtatagtatttaggatgtgtaatgttttttatagttgtaaatgtgtgtagtgttttaattttatgttggttttttttatttatttaaaatttttataaggttaatttgtttttaatttttttagaaattagtatgttatttgatttatagttattttttaaaatgtgttatttaataattgtatgattgaatgttggggagtatgtagaaattagatattgtttgtttttgatatttagagaagattttttagaggaggtatttttttttgattttgaaggattagtttgttttgaaaattgaagaaaggggttaggtgtgatggtttatttttatagttttagtattttgggaggttaaggtaggaggattatttgaagttaggagtttaggattagtttgggttgtattatggtgagattttgtgttaattaaaaaataaaagaaaggagggggggtcgggcgtggtagtttatatttgtaatattagttgtgtgggaggtcgaagtgggtgtattatttgaggttaggagtttgtgattagtttagttaatatggcgaaatttcgtttttattaaaaatataaaaaaattagttgggagtggtggcgcgtgtttgtagttttagttgtttgggaggttgaggtaggagaatcgtttgaatttaagaggtagaggttgtagtgagttaagatcgtgttattgtattttagtttgggtaatagagtaagtttttatttaaaaaaaaataaaaagaaaaggaagtagaaaaaaaagaaaattagttggatgtggtggtgcgtgtttgtagttttagttatttgggaggttgaggtgggaagattgtttgagtttgggaggtttcggttgtcgtgagttgtgattaattgtattattgtaattagattgggtgatagaggaagagtttgttttaaaaagaaaaaagaaaagaaaaagttaagataaagggggagggtagagtttaggtgataattaaatgatagtttagagtaaagtaaggttaatattggattaggattgtgaagtgaaattagtgttttgaatcgttggaaataagaaggtatatgtgaaatgttgtatttagaaattttttatttgaagttgtgtatttgttttggaaattaaggttgttattttgtattaagtggattagattttgttagtaagattcggatgttttatttttattgatagaatttttaataatttatgaatttagagaataaagtttttgtaagaaattatgtttttggttagcgtggtggtttatatttgaaattttattattttgggaggttaagataggtagattatttgaggttaggagtttgagattagtttggttaatatggtgaaattttgtttttattaaaaatataaaaattagttgggcgtattggtgtgtttttgtaattttagttatttgggaggttgaggttagagaattatttgaatttaggaggtagaggttgtagtgagtagagatcgtgttattgtattttatttcgggtgatagagcgagattttattttaaaaaaaaaaaaaatgaggtttaattggtttatggttttgtagattgtgtatagtaagtgtaatataggtttttgtttttggggaggttttaggaagtttttagttatggtagaaggtggtttttttttattttagttatagagaaggaaggaaagggtttttaatgtaggtatatatttttgaatagtatagttattgagtgagggaatatattttttagttagttgtgaagttaaaattgtttatttttatttttatttatttattttgagataggatttttttttgtcgtttaggttggagtgtaatgatataattgtggtttattgttatttcgattttttgggtttaagggatttttttattttagtttttggagtagttgggattatacgtgtgtgttattatgtattgttaattttgtatgttttgtagggagagggttttgttatgttgtttaggttggttttaaatttttgggtttaagtgagttatttgttttagttttttatagtgttgggattataggtatgcgttattgtgtttgattaaaatttttttttgtgtgttttgttttgttttgttttgttttgttttttgagacggagttttgttttgtcgttaggttggagtgtagtggtgtgattttagtttattgtaattttcgttttcgggtttaagtgatttttttgttttagttttttgagtagttgggattataggcgtgtgataacgttttgttaattttgatatttttattagagataggtttttgttatgttggttaggatggtttcgattttttgtttttatgattcgttcgttttggttttttaaagtgttgggattataggcgtgagttatcgtatttagttaaattttttataataataaagatgttgaattaaaattattaagtttatatttaagatggtatttgaggagttatatttttaggtatttatgttgttgtgtggtttttgtttatatttaatagggttaaatagtgtgattaagaggatattgtggaaatgatagagtgtgattttataggataggttagaaaagttattatagtttttattttgtttttttttagattattttttttaaggaaagttagttgttatgtggtgagtgttaggtttttgagtttaagttaagtcgttatattttttgtgatttgtacgtatatatttagatggtcggaagtaattgaagatttataaaagaagtgaaaatagttttaattgatgatattttattatggtgatttgtttttgttttattttaattgatatgatatatttttttttttattttatttaagaaggtattttgtaatattttttttatttttgagaatgtaatttgtat

SEQ ID NO: 111 - DNA, 3628 bp, Artificial Sequence
  chemically treated genomic DNA (Homo sapiens)
tttatacggttagaaagggtttaggcggttttcggcgtttttttagtttttgtttttatggcgtattttttcgttagtcgttttttttcgtatttcgtcgttcgttcggttcggtcgcgtgcggtttttcgggagtttttatttcgtcgcggattttagcgattattaagttcgtacgcggtttgtcgtaggtttgagtagaaggtttcgcgtatatttatcgcgtcgcggtcgcgcgggaggtttgtgtcgttcgcgttatttattggtcgggtttcgcgggcgtagcggagcgggcgggtggtcggttcggacgcgtttttttcggtcgcggtttcgcgcgttatgtgttttcggcgggacgcgttattttcgggtttgtcgcggcgtttttaattcgggttagggagcggggcggagggggcggtcgggtggtttagaggaggttttttttttttttttttttttgaatgaatcgtgtgacgttacgtataggaaatcggtcgggttgtgtagagaatgaagtaagaggataggtattatagtttcgttttcgttttttttttttcgcgttcgttttttcgcgtcgtttgttcgttcgttcgtcgcgttttcgttcgtcgtttttcgtggtttcgtcgcgttgtcgtcgtcgtcgttgttagcgaaggtgtcggggtttcgggttttttttgtcggcggtcgttagcgttcggagcgggttgcgcggcgggagtttcgggaggcggtcgtagttagcgtcgtcgcgtaggattaggaggaggagaaagggtgcgtagttcggaggcggggtgcgtcggtggggtgtagcggaagagggggtttaggggggagaatttcgtagtagttattttttttaggaaaagagggaaaaaataaaatttttttttattatttttttttttttatttttcgtcgtattatatatagcgcgggtttttagcgttcggtatcggcgggttaggcgcgttttgtttttatttatttagtagtttttcggaaaatgtatttgttgttcggagtttaattagaagaggatttttgttttcgttttcggtttttttatcgtttttttttttttgttttttttttggggaggcgtgaagcggtttcgtggatagagatttatgtttgtgttcgcgcgtgtgtgcgcgcgtgtaaattgtcgagaaggggaaaatattataggatttttgcgaatatcggattgaaaattgtaatttatttgtcgtcgtcgttgttttttttttttttcgagtttttgagattttcggttgggatttttgcggattgatatttttgtgaagtagaagtttgggaatcgatttggaaatttttttaatttttatttttttttttttcgatttttgatttattgggaagttttaaattagttataattggagagtgttgaagattgatgggatcgttgttttatgtatttgttttggttttataaaaaggaaatttgatagaggattatgttgtatttaaaaaatataagtaagttttttgtataggaaattggtttaatgtaatttttaatggaaatttttgagattttttatttaaagtgtattcgagtaaatttaatttttaggtagtttaatatattttttttagtcgtgttatttgtagtgtgtatgttttgtttttatttagtgtgtatagggaaacgtatttgattttttatttattagtttgttttttttttaattttttagtattatagaggaagtagattgatattaataatatttattaataataacgtgttttatgaaataaagattcgaaaggaattggaataaaaattttttgtattttatgttaagggggaaatattagaattaagtgtttcgcgtgattgaagatattttttcgtttaagaatgtaaagtatatttaataaaatagttggattataattttttttttttttttgggggtcgtggggtgggagttggggcgagaggtgtcgttggttttcgttgttttttttttgggaaggatggcgtacgttgggagaatagggtacgataatcgggagatagtgatgaagtatatttattataagttgtcgtagaggggttacgagtgggatgcgggagatgtgggcgtcgcgttttcgggggtcgttttcgtatcgggtattttttttttttagttcgggtatacgttttatttagtcgtatttcgggattcggtcgttaggatttcgtcgttgtagatttcggttgttttcggcgtcgtcgcggggtttgcgtttagttcggtgttatttgtggtttatttgatttttcgttaggtcggcgacgatttttttcgtcgttatcgtcgcgatttcgtcgagatgtttagttagttgtatttgacgttttttatcgcgcggggacgttttgttacggtggtggaggagttttttagggacggggtgaattgggggaggattgtggttttttttgagttcggtggggttatgtgtgtggagagcgttaatcgggagatgtcgtttttggtggataatatcgttttgtggatgattgagtatttgaatcggtatttgtatatttggatttaggataacggaggttgggtaggtgtatttggtgatgtgagtttgggttgaggttataggttcgagatgcgggggttggagtgcgggtgggtttttggggtaatgggaggttgtggagtcggcgaaataaaattagagttgttgtttttcggcgtttttatttttttttttggataaagcgtttatttttaatttgatcgataacgtttgttatttaaaagtttttaatttgtttgttagtcgtggagatttaaagatttagcgtttgtaatttagtaggatgtggtggtaaatggtatttttttagtgttttttaagttgaaggtttaggagtttttaggattatcgttttttggtttgagtagtttgttggaatcggagggaggttttagggattgtttatgaattagatattaggttgggttttgatagtttgtattttaaataagtttttttgaaataagttcgttgtatattaaaattggagaataattcgattagaagaatagattttatagaagattaagggtattattaatcggtaaaattttttaaaagaggaaaattaatgtaagtttttttttttgaaaaatttagttgtgtttgtaaagagttaagttgatattttaaagtttttggattggaatttttagtgtgtgttatgtttttagtgggcgtgatgaggtgttttgaggagtattaggttatggttttgttattttgttagtgatagaatttgtatcggttgtattttttgtattttataatttgtgtatggtttattagtttgttagaatgttagaattttttgttttttattatttagagtggatttaattttgtggtcggttgaaaaaaatttgtatttaggtatttatgtaaagtgtagaagaattgatttttagttgtggattattttatttttattttagttgaagtgattgatatttgtggttttgaagaatatttgtgagatgatttttttttcgtattgtgttagatagagtttttattattatattatataatt

SEQ ID NO: 112 - DNA, 3628 bp, Artificial Sequence
  chemically treated genomic DNA (Homo sapiens)
aattgtatggtataatgatgaaagttttatttagtatagtacgagaaaaagattattttataaatgttttttaaagttataggtattaattattttaattaaagtaagggtaagataatttatagttaagaattaatttttttatattttatatagatatttagatgtaaattttttttagtcgattataaaattaggtttattttgagtggtgaaaaataaaagattttaatattttagtaaattggtaaattatatataaattatagaatataaagaatgtagtcgatgtaaattttgttattgataaggtagtaaagttatagtttgatattttttaggatattttattacgtttattgggaatatggtatatattggagattttagtttaaggattttggaatgttaatttagttttttataaatataattaagttttttagggaaaaagatttatattggttttttttttttggaaaattttatcgattgatgatgtttttggttttttgtggagtttatttttttaatcgggttgttttttaattttagtgtataacgggtttgttttaggggagtttgtttgggatgtagattgttaagatttaatttggtatttggtttataagtagtttttgaaattttttttcggttttaataagttgtttaagttaggaaacggtggttttggggatttttggatttttagtttgagaaatattgaaggggtattatttattattatattttattggattataaacgttagatttttggatttttacgattagtaagtaagttaaagatttttagatggtaggcgttatcggttaggttgggagtgaacgttttgtttagaggaggaggtagggacgtcgggaagtaataattttgattttatttcgtcggttttatagttttttattgttttaggagtttattcgtattttaattttcgtatttcggatttgtggttttagtttagatttatattattaagtgtatttatttagttttcgttattttggatttaggtgtgtaggtgtcggtttaggtatttagttatttatagggcgatgttgtttattaggggcgatatttttcggttgacgttttttatatatatgattttatcgaatttaaagaaggttataatttttttttagtttatttcgtttttgaagagtttttttattatcgtggtaaagcgttttcgcgcggtgaagggcgttaggtgtagttggttggatatttcggcgaagtcgcggcggtagcggcgggagaagtcgtcgtcggtttggcggagggttaggtggattataggtggtatcgggttgagcgtaggtttcgcggcggcgtcgggggtagtcggggtttgtagcggcgaggttttggcgatcgggtttcgggatgcggttggatggggcgtgtgttcgggttgggaggagaagatgttcggtgcgggggcggttttcgggggcgcggcgtttatatttttcgtattttattcgtagtttttttgcgatagtttataatggatgtattttattattatttttcggttatcgtattttgtttttttagcgtgcgttattttttttagaggaaaagtaacgggggttaacggtatttttcgttttagtttttattttacggtttttagagaaagaagaggagttataatttagttattttattggatgtgttttgtatttttggacgagggggtgtttttaattacgcggaatatttgattttggtgttttttttttggtatgagatgtaggaaatttttattttaatttttttcggatttttattttatgaggtacgttattattagtaagtattgttaatattagtttattttttttgtgatgttgaaaggttaaagaaaaaataaattaataagtaaaaaattaggtgcgtttttttgtatatattgagtgaaagtagggtatatatattataagtaatacggttaaaaagaatgtattaagttgtttggaaattaaatttattcgaatgtattttaagtaaaaaattttaaaggtttttattgaaagttatattaaattaattttttgtgtagagaatttatttgtattttttaagtatagtatgattttttgttaagttttttttttgtaaaattaaaataaatgtataaggtaacgattttattaatttttagtattttttagttatagttgatttgaaattttttaatgaattaggagtcggggggagagggagtaaaaattaggaggatttttagatcgatttttagatttttgttttatagaaatgttaattcgtaggaattttaatcggagattttaagagttcgagaaaaaaaaaaggtagcggcggcggtagatgaattataatttttagttcggtattcgtagaagttttgtgatgttttttttttttcggtaatttatacgcgcgtatatacgcgcgggtataggtatgaatttttatttacgggatcgttttacgtttttttaggagagagataggggagaggggacgatgaaggagtcggggacggaggtaggaatttttttttgattaaatttcgaatagtaaatgtatttttcgaaaagttgttggataaatgaaggtaggacgcgtttggttcgtcggtgtcgagcgttagaagttcgcgttgtgtgtggtgcggcgaggggtggggagaaggaggtggtgggggagggttttattttttttttttttttttaaaaaggatgattgttacgaagtttttttttttggattttttttttcgttgtattttatcggcgtatttcgttttcgggttgcgtatttttttttttttttttggttttgcgcggcggcgttggttacggtcgtttttcggagttttcgtcgcgtagttcgtttcgagcgttgacggtcgtcggtagggagggttcggagtttcggtattttcgttggtagcggcggcggcggtagcgcggcggggttacggagagcggcgggcgggagcgcggcgggcgggcgggtaggcggcgcggaggggcgggcgcgggaggaagggggcgggagcggggttgtggtgtttgtttttttattttattttttgtatagttcgatcggttttttgtgcgtaacgttatacggtttatttaaaaaaagaagaaagaaagaggttttttttgagttattcgatcgtttttttcgtttcgttttttggttcgggttaaaggcgtcgcggtaggttcgggagtggcgcgtttcgtcgggggtatatggcgcgcggggtcgcggtcggggagggcgcgttcgggtcggttattcgttcgtttcgttgcgttcgcggggttcggttagtgggtggcgcgggcggtataggtttttcgcgcggtcgcggcgcggtgggtgtgcgcggggttttttgtttaggtttgcggtaggtcgcgtgcggatttggtggtcgttggggttcgcgacggggtgggggttttcggggaatcgtacgcggtcgggtcgggcggacgacggagtgcggaggggggcggttggcgggagggtgcgttatgaaaataagggttggaaaagcgtcgggaatcgtttggattttttttggtcgtgtgag

SEQ ID NO: 113 - DNA, 4603 bp, Artificial Sequence
  chemically treated genomic DNA (Homo sapiens)
ggttagggttttattttttttggaattggggtagtgagtaatttagtttgttgtgtttcggttttttttttttaagaaggttttttttttttttttttttgagagagtttttttttgtcgtttaggttggagtgtaatggtacgattttggtttattgtaatttttgtttttcgggtttaagcgattttttagttttagttttttagtagttgggattataggtatgtgttattaagtttggcgaattttatgtttttagttgagatgtggttttattatgatggttaggttggttttgaatttttgattttaagtaatttgtttattttagttttttaaagtgttgggattataggtgtgagttattgtgtttggttaggatttgttttttttttttttttttttttttgagaaggagttttgttttgtagtttaggttggagtgtgatggcgtgatattcgtttatcgtaatttttattttttgtttttaagcgattattttgttttaatttttcgagtagttaggattataggtgtgtgttattacgtttagttaattttttgtatttgtagtagagatagcgttttattattttggttaagttggtttcgtgattcgtttgttttagttttttaaagtgttgggattataggcgggagttattgtatttggttttaggatttgttttttttaagtatagaagttttttgaatgatgtttaggatatggaaaggatattttaatatatttgttaattaaagtattataaattttgttttttttttttatagataaaatatttttttaagattttgtatttttttttagagtgttgtatatttgagttagtttaattatagtgtagtgattttgatttaaatttgttggtttaaattttggtttttttagtcgtttattgtgtgattttgggtaaattaattaatttttttgtgttttagtttttatatgttaaagtagtagttatagtaatagtatttattttatagtgttgttgggatggtgaaatgagtaaatatttgtaaatgttttggtatatggtagttgtaatattagtgtgtagtattgtttttatgattagaaataatgtttttaaagttttatttttttgttggtttgaatgtgttgtgagaatatatattgttagttttgtttattataaatttgttgagttttttgtaggtatttttaaatgggtttgtaatttattatttttatttttttttttttttttttttttttttttttttattttttaattttttttataaagattgaaagtgaatttttattttttttttattttttaaaaattttatttgtgggtcgggtacggtggttttatgtttgtaattttagtattttgggaggttaaggagggtggattataagtttaggagttcgagattagtttggttaatatggtgaaatttcgtttttattaaaaatataaaaaattagtcgggcgtggtggcgtatgtttgtaattttagttattcgggaggttgaggtaggagaattatttgaatataggaggtagaggttgcggtaagtggagatcgttttattgtttatttgtatgtggatataagaaagggttaatatggtcgataattattttatgagttttttggttttatttgaaaagtgaagtgtgtttggggaaggagttggttaggaaaatagatgtttttttttttgatttattaaggaaatggagatttaaaggaaagtttgaagtattttgtggtttttacgggttcgtttttaggaagtttttgttttatttggggaaattttaagttttatagtgagaaagttgtaaattagtttttaggagacgttgtttgttaaagttattttaattttggaaaaggggagggaaaaaggtagataagtagtgatgatattagtaggaaattagtattaggttatttagttttgaagatttagtttttatttaaataattagtaagttttgaagtttttttttaagtaaatgggagtttttttggattttggagtatatagaggattttattttttttaaaattttgtttttaggtaatttttttgagaatcgtttatttttagaagattggtggagtttgatttgaaggtatgtaattaataattttttttattttagagttttatgtttgaatttttttttttgttttatggtttcgtgttgtagaaatttgtaaaaatttgttagtaatggtattatttttttttagatttttttgttatgtttgggaaaataaaagttaaaaaattcggaagtttttaatatagttttttatcggggtagaaatatgttagtttatagagataaagtttggtagatttattaaaattagagattagaattgttaagaaattataaggtaaatgttagatgcggtagaatagaaaggtgtttttaataaattatttatttgattttagggttagtagtagggaagattttttggattattatattaaaaatgatatttttttgttttttttaatattaaaagtaatgtgtatgtttatatatgtataaaatttgagaaatttaattggaagtttagaaggaaatttgtattatttatagttatgttatttcgatataattattgtttgttatggaggttttgatttttgttgtgtttttttttttttatttatttatttatttatttatttatttatttatttatttatttgagacggagttttttttttttattttttagtatttaagttggagtgtagtggtataattttggtttattgtaattttcgttttttaggtttaagtaatttttttattttagttttttatgaagttgggattataggtatatattattaagtttagttaatttttgtattttttgtagagacggggttttatcgtgttgtttaggtttgtttcgaatttttggttttatagtgatttatttgttttagttttttgaagtgtttttttgattataatgaaatttagtatgtagaatattatagtttatagattagttagatggaaatattgatttatgtaatttttattttttttcgttgatttgagtaatttttgtttaaaattattttttttttttgaggtttaggaggtttttttgttgttgttttgttttgtttttgaggtagggttttgttttgttatttagggtggagtgtagtggtataattatggtttattggaatttttattttcggggtttaaatgatttttttgttttagttttttgagtagttgggattataggcgtgtattattatgtttggttaatttttgtattttttgtagagatggggttttattacgttgtttagtttggttttgaatttttggttttaagtgatttattcgttttggttttttaaagtgttgggattataggcgtaagttatgatattttatttgtttttttttttataaagtatttttttgtttttaaaaatagttaagttttgtatattgattatatattttaagtgtttatagaataaatagtattataatgaaaattttattattgtattgtttttttgattatgatgaaatttagtatagagaatagtatagtttataaattgattagatggaaatattgatttatgtaatttgtttttttttagtgaaaataagtttattagagaagtaaagaaataaaagaatggttattttatagatagagtagtcgatttatgtaatttttaattttttatattgatttgagtaatttttgtttaaaattattttttttttttgaggtttaggatattttatttatttatttttttttttgaaatagggttttattttgttatttagggtgaagtgtagtggtatgattatggtttattgtaatttgtgttttttaggtttaaatgatttttttattttcggttttttgagtagttgggattataggtatgtgttattatgttttgataattttttgtatttttagtagagattaggtttcgttatgttgtttaggtttgaggtttaggattatgttttttttttttgtaagataaaggtttgtttttttataggtagtagtttgaagttaagatgtaatatatatattttacggtattttgttgtttttgggttgatagattataaggataattttgttttttttagattgttttgtgtttaaaatttaaagtatagagttaagtgttatttttgttacgtgttggaaatgaatgtaagggttttaattaggttattaggtttgagaaaaattgtgttgtgtttttttattttaattttttttttttgggaatattttgatttgggagaaattaaggtgaattgaattttaatataagtattttttaagttttttaaaaagtaatttgtaagtgttggggaaaagttttttgggttgttgttttttgaagtagtttcgtcgtaatttttattttttagtatttttaggaaagtttaatgtttagaacggagaaggttgtggtgaggggagggtttgggaagttagggggttatatgtttttattttttaattttttgttttatttttttgttttttttagg

SEQ ID NO: 114 - DNA, 4603 bp, Artificial Sequence
  chemically treated genomic DNA (Homo sapiens)
tttgaaagggatagagaggtggggtagggagttagagagtgaggatatatggttttttgattttttaggttttttttttattataatttttttcgttttgggtattagatttttttagaagtgttgaaaaataaaaattacggcgaggttattttaaaaagtaatagtttagaaaatttttttttaatatttgtaagttattttttaggaaatttggagggtgtttatattggaatttaatttattttgattttttttaaattaaaatgtttttagagagagaaagttaagatggagggatatagtataattttttttaagtttggtagtttgattggagtttttatatttatttttagtacgtggtagaaatagtatttggttttatgttttaagttttagatataaagtaatttgggggaggtagggttatttttatgatttattaatttaaagatagtaaggtatcgtgaggtatgtgtgttatattttaattttagattgttatttgtaagagggtaggtttttattttatagaaagggaaggtataattttagattttaagtttgagtaatatggcgagatttggtttttattaaaaatataaaaaattattagggtatggtggtatatgtttgtggttttaattatttaggaggtcgaggatggaaggattatttgagtttggggagtataggttgtagtgagttatgattatgttattgtattttattttgggtgatagagtgagattttgttttaaaaagaaaaataaataaataaaatattttagattttaggaggaaagggtggttttagataagagttgtttaaattagtgtaggaagttaaaaattatatgagtcggttgttttgtttatggagtagttatttttttgtttttttatttttttaataaatttgtttttattaaaaaaaaataaattatatgagttaatgtttttatttgattagtttataaattatgttattttttatattaaattttattataattagaggagtaatgtagtgataaaatttttattgtaatattatttattttataagtatttgaggtatgtagttaatatgtagaatttggttatttttagaaataagaaaatattttataaaggaaggaataggtggggtgttatggtttacgtttataattttagtattttgggaggttaaggcgggtggattatttgaggttaggagtttaagattagattgggtaacgtggtaaaattttatttttataaaaaatataaaaattagttaggtatggtggtgtacgtttgtggttttaattatttagagggttgaagtagaaggattatttgagtttcggggatggaggttttagtgagttatgattgtgttattgtattttattttgggtgatagagtaagattttgttttaaaaataaaataaaataataataaaaaaattttttagattttagaaggaaagggtgattttagataagagttgtttaaattagcgaaggaagataaaaattatatgagttaatgtttttatttgattagtttataaattatggtattttatatattaaattttattataattagagaagtattttaggagattgaggtaggtggattattgtgaggttaggaattcgggataagtttgggtaatacggtgaaatttcgtttttataaaaaatataaaaattagttgggtttggtggtgtatgtttgtggttttagttttataggaagttgagatgggaggattgtttgaatttgggaggcggaagttgtagtaagttaagattgtgttattgtattttagtttgagtgttggagggtgaaagagggagatttcgttttaaataaataaatagataaataaataaataaataaataaataaataaaggaaggaagatatagtaaaaattaaaatttttataataaatagtggttatatcgaggtgatataattatagataatataaatttttttttgggtttttaattgaattttttaaattttatgtatatgtgagtatatatattatttttggtgttaaaagaaataaaaaaatgttatttttaatgtgataatttaggggattttttttgttattagttttgaggttaaatgagtggtttattggagatatttttttattttatcgtatttagtatttgttttgtggttttttgataattttgatttttagttttagtgagtttattaaattttgtttttgtgagttaatatatttttgtttcggtaaaaggttatgttggaggttttcggattttttaatttttgtttttttaggtatgataaagaaatttaagaaaaaatagtgttattgttgataagtttttgtaagtttttataatacgaagttatgaagtaaaggaaaagatttaagtatgagattttggagtaagaagggttgttaattatatatttttagattaagttttattaattttttggaagtaaacggtttttagggaaattgtttgaaaataaagttttaaagaaagtagaattttttgtgtgttttaaggtttaaagaagtttttatttgtttgggaagagattttaagatttgttggttgtttaagtgaaaattgaatttttaggattgggtagtttgatattagttttttgttgatgttattattgtttatttgtttttttttttttttttttttagggttaagataattttgataaatagcgttttttaaaggttaatttataatttttttattgtagagtttggggtttttttaggtaaagtaaaagttttttagaaacgaattcgtggaagttataaagtgttttaggtttttttttggatttttatttttttggtaagttaaaaagggaagtatttgtttttttaattaattttttttttaaatatattttattttttaaataaagttaaaaagtttatgaaatagttgtcggttatgttaatttttttttatgtttatatgtaaataaataatggagcgatttttatttatcgtaatttttgttttttgtgtttaagtgatttttttgttttaatttttcgagtagttgggattataagtatgcgttattacgttcggttaattttttgtatttttagtagagacgaggttttattatgttggttaggttggtttcgaatttttgagtttgtgatttattttttttggttttttaaagtgttgggattataggtatggagttatcgtgttcggtttataaataaaatttttaaaagataaaagaaaagtggggatttatttttagtttttgtgggagaaattaagaaataaaaagaaaaagaaaggaaaaaaaaaagaaaagtggggatggtgaattataagtttatttggaggtatttgtaagagatttaataaatttgtggtaggtaaaattgatagtatgtgtttttatagtatatttaaattagtaggaaagtgagattttgaagatattatttttaattataaaaataatattgtatattaatattgtaattattatgtgttagggtatttataaatatttatttattttattattttaataatattgtaagataaatattattattatgattgttgttttaatatgtgaaaattaaggtatagaaaggttaattaatttgtttaaggttatatagtgagcggttggaagagttaagatttaaattagtaagtttggattaaagttattatattataattaagttaatttaaatgtgtagtattttggaaagaggtatagagttttagaaagatgttttatttatggggaaaaaaagtaagatttatgatgttttgattagtaaatgtattaaaatgttttttttatgttttaggtattatttagagaatttttgtgtttaagaaagataagttttggggttaggtgtagtggttttcgtttgtaattttagtattttgggaggttgaggtaggcggattacgagattagtttggttaagatggtgaaacgttgtttttattataaatataaaaaattagttgggcgtggtggtatatatttgtaattttagttgttcgggaggttgaggtaggataatcgtttgaaggtaggaggtggaggttgcggtgagcggatattacgttattatattttagtttgggttatagagtaagatttttttttaaaaaaaaaaagaaaagaaaaagataagttttggttaggtatagtggtttatatttgtaattttagtattttgggaggttgaggtgggtagattgtttgaggttaggagtttaagattagtttggttattatggtgaaattatattttaattaaaaatataaaattcgttaggtttggtggtatatgtttgtaattttagttattaggaggttgaggttggagaatcgtttgaattcgggaggtagaggttgtagtgagttaaaatcgtgttattgtattttagtttgggcgatagagaaagatttttttaaaaaaaaaaaaaaaaaaaatttttttgggaaaggggggtcggagtatagtaggttgggttatttattattttagttttagggaaggtggggttttgatt

SEQ ID NO: 115 - DNA, 2527 bp, Artificial Sequence
  chemically treated genomic DNA (Homo sapiens)
ataaaaaaagatatgaaatgaatcggggaaaatatttgttatataattaagaatgaaggtttttaataaaatttgtaaaattatatatatttttaggaatgaattaataaataatttttatgaattagaaaaaagtgataatttaattaaaaaatgaataagggatataagtaatgtgttttatagaaaaaataaaaattgataatgaagttatgaaaaaatgtttagtttttttagtaattgtataaaataaattaaaataatgagatattatttttaagattagtaaatgttaaagaaaaataataattggtgagggtgtggggaagtgggtatttatatttatgtttggaaatataaattggtgtaattttatagggagagtaattttataatattttttaaagatttatatgtataattttatggtagagaaatttattttttttttaggatttttttttttttaaaaatagtgatgtggatgaaaaatatatgtttattattgtatagggtataatagttgaaaattggaaacgataatatttatattttttttagtaggggaatggttaaataaattttataagttatttggtagatattaggtatgagttaaaagttagggtttagttagagatggaaagtatattagtaatttgaaagggaaaatgtaatatgaagaattattaattagtaaaagaaggttaattgttaaaggtataagagtatttaagttgtttgtagttagtaggtttcggttggtgagtaggaagttgttcgttgggaggttgttaaagttttttgaaggtgagtattattggttttataagttgttggtagttatggcgttaagagtaggaagagaagtattagaattcggaagagaaatttagttttttgttaggttttgtatcgtttttttggcgttttttattgataaagttagtaaaattgtgtcgttagtaaaggagatttttttatgggatgtagtttggtgttattaaagagaatagagtggatttggagtttagatgtaatataatgattgatattggtatagtatatttattttgtttttgtaaataaaatggtatatgtgatgtttttttttgtttttttgtatataaaataatatttgtttttatttattatgtatttatgtttttattttgtatgttaggagttaagtattttgtatgtattaatttattttgtttttataataatttttatatgtaggaattattatagttattttatgaatgagtcgaggaaggtattgagacgttaagtaatttgtttaaggttacgtagttagtaagtggtagagtaagaattattatggttttataagtttaggaaaaagtttgaaagaattaaaatgttaatagcggggattttaaggaagtattgaagaggttatgggagaagtttttattttgttaaaaaattagttttttaaataaataaatatagtgaggtttttttagaagtagatgttattatgttttttgtatagtttgtggaattgtgagttagttaaattttttttttttataaattatttagttttaggtatttttttataatagtgttaggatgagttgatatagttttttatattgtaatttaaggtaatgttttgtataaagggatgagttagattgtttagtaattaaaacgtaaatataaattataagtatatttatttatgaattggggggttgttttgtgtgtatagataaggtatattttttaaaaaaattatttttttaagaagaaaataaattagttaataaacgataatttatagtgttaggaagtgagaaataagtgtgtgataaacggtggagaatgggagtatttttcgtagtgggcgggaggagacgaggagggcgttttttggggagtggtagtggttggagtaaaggtttggaggaggtaagttatgtgttttgagtttttggtttttgttttattttgtgtttgagttggtttgaaggttggttgtttagattgagttttttgtttgtttgtatttcgttaatagttttagaagaaggtgattggtggttgtttgaggaatattagtgggtaagagaattagtatttttggagtatttgttgtttgtgagattaagtattatgtatattgttttatttattttttatagtaattttattaagtagtttttttttacgtgaaaagatggaggttgggtggagtaaaaggaggtatttagagtttttagtaagtgagaggtagagttgggatttgaatttagatttgtttgatattgaagtttaggttggttttattttttcggattgttttttagggagtagaagatagatattttattttagttggttgtttttagaagtttgattttgttggtttaaaacgattttagttttttgtttagaggttgcgggttgcgggttaagatattagtagaaggagggtttagttagagaggttgatatgggtttttatttatcgttatttttttttttttttagg

SEQ ID NO: 116 - DNA, 2527 bp, Artificial Sequence
  chemically treated genomic DNA (Homo sapiens)
tttggaaggaaggagagatgacggtgagtagaagtttatgttagtttttttggttgggttttttttttattgatgttttgattcgtagttcgtagtttttgggtaaggaattaaagtcgttttgagttagtagggttagatttttagaagtagttagttaaggtaaaatatttgttttttattttttggaaagtagttcggagaggtggaattagtttagattttagtattaggtagatttggatttaaattttagttttgttttttatttgttgaggattttaaatatttttttttgttttatttagtttttatttttttacgtggaaaagaattgtttggtaaggttgttgtggggagtgaataaagtaatatatatagtgtttaattttatagatagtagatgttttagaaatgttaatttttttgtttattggtattttttaggtagttattagttatttttttttgaagttgttggcggggtataggtaggtaggaagtttagtttgaataattagtttttagattagtttagatataaggtgaaatagaaattaaaaatttagagtatatgatttattttttttaaatttttgttttaattattgttattttttagggaacgtttttttcgttttttttcgtttattgcggagagtgtttttattttttatcgtttattatatatttgttttttattttttggtattgtgagttgtcgtttattaattggtttattttttttttggaaaaataatttttttaaaaaatatattttatttatgtatataaagtagttttttaatttatgaatggatatgtttgtggtttgtatttgcgttttaattattaagtaatttggtttatttttttgtgtaaagtattgttttaggttatagtgtaggaaattgtattagtttattttagtattgttataaagaaatatttaagattggataatttataaagaaaagaggtttaattggtttatagttttataggttgtataggaagtatagtgatatttgtttttggggaagttttattgtatttatttatttgaaggattgattttttaataaagtgaaaattttttttatggtttttttaatgtttttttgaggttttcgttgttaatattttgatttttttagatttttttttaggtttataaagttatagtaatttttgttttgttatttattagttgcgtgattttgggtaagttatttaacgttttagtgtttttttcggtttatttataaagtagttataatgatttttgtatgtgaaggttattatgagaataaaatgagttaatatatgtaaaatatttagtttttggtatgtagagtaaagatataaatatataataagtagaaataaatattgttttatatatagagagataaagagagatattatatatattattttgtttataaaagtagggtaagtatattgtgttagtattaattattgtgttgtatttgagttttaagtttattttgttttttttggtgatattaagttatattttataaaaagattttttttgttagcggtataattttattggttttgttagtagagggcgttagagggacggtgtaaggtttagtagaggattggatttttttttcgggttttggtgtttttttttttgtttttaacgttatgattgttagtagtttgtagaattagtggtgtttatttttagggaattttggtagttttttagcgggtagttttttgtttattagtcggggtttgttgattgtagatagtttgagtgtttttgtatttttagtagttagtttttttttattagttaataattttttatattatatttttttttttaaattattggtgtgttttttatttttaattggattttaatttttagtttatgtttggtatttattagatggtttgtaaaatttatttaattatttttttattgaagggaatgtgagtattatcgtttttagtttttagttgttatattttgtgtagtagtgaatatgtgttttttatttatattattgtttttgaaggaaaaaaaattttggaagaggaataaatttttttgttatagggttgtgtatgtaagtttttggaaaatgttgtgagattgttttttttataaggttgtattaatttatatttttaaatataggtgtaagtgtttatttttttatatttttattaattattatttttttttaatatttattaattttaggggtaatgttttattgttttagtttgttttgtgtaattattaaggagattgaatatttttttataattttattgttaatttttattttttttgtgaaatatattgtttatattttttatttattttttagttggattgttatttttttttaatttatagaaattatttgttgatttatttttaaaagtgtgtatagttttatagattttattaagggtttttatttttagttatgtagtaaatatttttttcgatttattttatgtttttttttat

SEQ ID NO: 117 - DNA, 7809 bp, Artificial Sequence
  chemically treated genomic DNA (Homo sapiens)
ggataaggtataggtaagtgaaggaaattttttttgagttaatgagatagattttttgcggatataaagagtttttatatttttttgttttgtttttatttttttttttttgtatttattattatttaatatagtatgttttatttattgatatagtttattatttgatttttttattggaatgtaaattttaaaagtagggattttgttttgtttatttttatgtttttagtgtttgattataggtttaataaatattcgtagaagtgaacgaatggggttgaggttttggtgtttaagagattatattttaaggtggatttttaagagtgtggtttatagagttaggttcgggttttaattttgtttgtttcggttatttagtatttaagtgattttaaatattcgtttttttgaattttagggtttatatttgtaaaatcggcggggggtgggaatatttttttggtaggattgtagttaaggataagtgaaataagtatgaaaagtggttagtacgatgtttgggatttagtaaatgtttagtaaatagaaacgattatttttgaaatgtgaaaatgaatcgtttagaacgatgggagtttataggattagatttttgtcgtttttttttttttttgtgtgggaggtgttagggtgggagggagggaagagggaatggaagattgtgtaaggtgggtttggttggattagatattcgagtttggaatagttaattgcgatttgggtataagggcggtgaggggagtttatggttttatttggggtggaggagggggttaaggggaagttatgtttcggaggaggttgaatgggcgggatagattacggttttatttatggttttttttttgttggaagtgtgacgatttttttcggatttttgtaaaagcggggttatagtgaattttggcgaagggttcgcggtggattaggaattggtgttagaattgtaaaagggtatttgcgttcggagtggggaggtgatgcgggggcggggcggggttttgggggcggggcgagtcgcggaggtgtcgttttggggcggggcggtgatagaaggatggattttgggggtgaggattgattttgggggcggggcgagagtgcgaattggagtttgaggttgagcggtgacgtaaggacgattttgagggtggagcgaggggaggggattggtttttggaggcggggcggtggtacgaggttagtttttgggggcggggcggtggcgtaagattgattttgggggcggggtgggggcgtgggttgaattttgggggcggggcggtggcgcggaatggattttggggtcggcgcgaggcgttgaggtgcgttttgagggcggggcgatgacgtagagcgaattttgggggcggggcgagattttttagatgcgtttcggggagtgggcggtgacgcggtggtaggttttggggataggcggtgattttagaattgattttggggatagggcgaggcgcggaggcgttttgaaggcgaggcggtgacgtaagagcgaatttttggggcggggcgaggcgttggagatgcgttttgcgggcgggacggtaacgcgggggcggggcggtgacgtgaggttagtgcggggatacggggcgggttttggggcggggacgtagtggtggattttggagcggggcggtgacgtggggcgggttttggggcggggcggtgacgcggagcgtgttttggggcggcgcggtgatgggaggtttggttttgggggcggggcgaggcgtagaggtgcgttttgagggcggggcggtgacgtaagagcgatttttgggggcggggcgaggttttggagatgcgttcggaggcggtggggagcgaagattgattcggggtcgtgacgcgggggtaggttttggggcgggggcgggttttggggattggggcgggcggtcgaggttcggaagcggattgaggcggtttggagttttagttggttattcgttatggacgaagcggatcggcggtttttgcggcggtgtcggttgcggttggtggaagagttgtaggtggattagttttgggacgttttgttgagtcgcgagttgtttaggttttatatgatcgaggatatttaggtgcgttttcggttttttgttttcgcgttgtacggtcgggtttttacgtttttcgaggaggcgttgtgcgggagtttagttttttttgtggttttaaattttttagcggagttaaagaattttaaatattttttagtcgggtgttcgttaaagcgattttatgttatatttagttagcgtatattgttagtgtttgtgttttttgtgtaaaggaaaaatgtgagatatattttgagaattttgaataagaaataatttatgaattggagaatattagattgaaagagttttagtgttgtaatgataaaacgttagaggtaagtatttattgggaaaatgtggaagtaaaataaagaaattatttgattggtttgtagttataaaattgttttttttttttaaggtttgttaattgattgtttttggttggttttaagttttatttttttttaatataagtatttattagatatgatttaagttaaattttgtttatgtttgtagtttaagtaagatttaggttatttaggatatttgattggttttgtttgtttaggaattttttatggttggtttttattttaatttacgttaatatttgcgaggaaggaggcgtgtgcgtttttatttttttagtatagaggtttcgggaatttattttggtattaggttgtttggtagcgtgtttttgggttagttatttattttttttgagttatagtttttgggttgtgaaatgggaataagaataatattgttataaggattaaatgaaataacggatgtgaaattgtagtgttaggtatagagcgggggattagcgtattttgttttttttggttagttttttttgtgtttagtttatgttttgttaagaggttttggaaatgaggggatttgatgtagaatggagaataatgaagttaaatatttgaggttttgtttaaaagtatttttttatttttgttttatttgatttttattataggtttgtgaggatgtaggagatattttttattatgaggtgtagtaggtgtgagtggttggttggatatttttggttagtgttttggtttagggaaagagtttttaaataattgagtattatatgagtaattatttattaataataaaataagttttgtgttttttgtgtggtttttattggggaatagtaatggtttgaggttatagtttttgtttttaggaatgtttacggggattataaatttaaatgtttatggaggattaatggatgggcgttatagtggatagtttttgtattgtttttcgtttttagttgagtatggttatattaataaatggtttagtattgttatattttatatttattttgaggtagggttttatttttgtttagtttggagtgtagggatgagattatggtttattgcgattttgattttttgggtttaagtggtttttttgttttagtttttagagtagttgggattttaggtatatgttattatgtttggttaattaaaaaaaattttttttttgtatagataggagttttgttatgttgtttagatgagttttaaatttttggttttaagtgatttttttgttttagtgttgggattataggtgtgagttattgtattcggtttagtttttatattttaaaaaagaagttgaaaattttgatttttttgttaaattttttggtttaaaatgttagtaataaatttagaaattttttaagaattttgtgggaattataggttgttattttgttatttagtatggttgaaaaataggtaggttttggaattagttggatttgggtttttattttggttttgttatatattagtaagttgtaaaaaattataattaatgagttaaataaatagaaaaattttatgatttagtttttttgaaattttttattttaaaaagttgggaagttttaatttaattttataaagttattgagggagaaaaagatgaaataatgtatttaatatagtgttgattttttggagtgtttagtaaatgtggagagaaatttaaatattattatttatttgtatgtagttaattgttttgttagtgagatttatttttttagtggtattgtaggtttgtgttgtttttaatagtagttattagttatatgtcgttaaaggtaaatttgaagtaattaaaattaaataaaattaaaaattggtagggttaagttttatagggtttgtgggttttttttttcgtgtgcggagatgagagatcgtagaaataaagatataggagaaagagatagaaaaaaagatagttgggttcgggggattattattatttagacgtggagatagggtagtggtttcgaatgtttggttgcgttgttattggatataaggtaaggggatagggtaaggagggtgaattttttaagtgattgataaggtgaagtaagttacgtgattataggatagggggttttttttttttaggtagttgaagtagagagagaaggtagtatatgttagcgtttttttttatgtatttataagaaagattaaagattttaagatttttattattttttttatcgttatttatgaattttaaataggaattaggagtacgggaggaatatgaaagtgggtaaggagcgtgattatggaagtatagtattatagggaggggtttaggttttcggatgattgcgggtaggtatggataatatttagttttttataagaagttggtggagtagagtgttttttgacgtttttaaggaaaggagatttttttttttttttttttttttttgaggtggtgttttattttttcgtttaggttggagtgtaatggtacgattttagtttattgtaatttttatttttcgggtttaagttattttttttttttttttttttttttttgagacggagtttcgttttgtcgtttaggttggagtgtagtgtcgtaatttcggtttattgtaagtttcgtttttcgggtttatgttattttttttttttagtttttcgagtagttgggtttataggtattcgttattacgttcggttaattttttgtatttttagtagagatggggttttatcgtgttagttaggatggtttcgattttttgatttcgtgatttgtttattttggttttttaaagtgttgggattataggtttgagttatcgcgtttagttagggtttaagttgttttgttttagttttttgagtagttggaattataggtgcgtattattacgtttagttaatttttttgtatttttagtagagacgggttttatcgtgttggttaggttggttttgaatttttaattttgtgatttgtttgttttggttttttaaagtgttgggattataggcgtgagttatcgcgtttggtaggagattttttttcgcggtttgttaagtaatgggtgtttttttagatattggtattatcgtttgattaaggagtttttaagcggtttttatgcgggtttgatagagggtttattttttgttttttaggttattttttataatgtttttttagtatttgattttatattcgtcggttatttttaagttatattagtaatgtaataaagagtaatattaaaagttaatgattaataatgtttataataatgattgataattgtttatgattatttttatatttaatttgtattatgattatttttattttaattattttttttattatattgaaatagtttgtggttttagttttttgtttcggtatttgggtaatttttcgtttataaaaatttagttttttagttgtattatttaagtgtttaatggttatgtgatatatggttattaaataggataatatagattaagaatatttttattattacggaaggtttttatagatagtgttgttgtaggatagttgaggatacggtgttattttatttttgtggattttgagaatttgtttagtgttgggtatttgaggataggtggtagataattagattttttttttttagtgattgattttattattttgatattttttaatttttttttttgagatagggttttgttttgttatttaggttgaagtgtagtggtgttattatagtttattgtagttttattttttgggttcgagttatttttttgggagttttagttttttgagtagttgggattataggtgcgtgatattatatttggttttttttttgttattttttgtagagatagggttttattgtgttgtttaggttggtttcgaattgggtttaagttatttttttattttagttttttaaagtgttggaattgtaagtatgagttattgtgtttggtttgtttgttaattttgatttttgttttgtttttatagtttttttagttagtgtttatgttttatggattttttttttttgtatttttgttttgtttttttatttttttttattttagttgtattatttttgttgttttttgatttggttatggtttatttttttttattttttattttgatttttggatgattttttgaaaggttatatttgtttttgttattttatttttaaaattttttggtggtcgggtatggtagtttacgtttgtaattttagtattttgagaggttgaggttggtggatcgtttgaggttaggagttttgagattagtttggttaatatggtgaaattttgttttaattaaaaaatataaatattagttaggtatggtggtgggtgtttgtagttttagttatttgggaggttgatgtgggagaattatttgtatttaaaaggtggaggttgtagtgagttgagatggtgttattgtattttagtttgggtgatagagtaagattttttaaaaaataaataaaaaaataatcgatggttggttacggtggtttatgtttataattttagtattttgggaggttaaggttggaggattatttgaggttagtttaagattagtttgggtaatatggtgaaattttgtttttattaaaaataaaaaaaaaattagttaggtatggtggtgtgtgtttgtaattttaattatttcggaggttgaggtaggataatcgtttgaattttggagttggaggttgtagtgagttgagattgtattagtatattttagtttgggtgatagagtgagatttcgttttaagaaaaaaaaaaaaaaataaaaataaaattaaaaaattttttggtggtatttgataggttttaggatgaattttttggtttggttatataaaggttttgttttttgttattatttattttttattttataagattttgaattcgttatttattttatgatatttttagttttatgtgtttttttttgggtatttgttttttgttgtgttattgttgatttgtttgattgtattttttattagaaatttgttttttaaggattgagattgtttatggtagtatttttagtatttagtatagtgttgggtattttttgttttgtaaaataatgaatagattagtaaaggttggtaaatggtatatagtgtatttgtagttttattgttgtttacgtgtttgattgtttagatttatagtagttgggaaatggggagataaggtgagagttatataaaagtacgtggataattagtattttgtttttttttttaaatagt

SEQ ID NO: 118 - DNA, 7809 bp, Artificial Sequence
  chemically treated genomic DNA (Homo sapiens)
gttgtttggaaagaaaggtaggatattaattatttacgtatttttatatggtttttattttgtttttttattttttagttattgtaagtttaaataattaggtacgtgggtagtaatggagttgtaggtgtattgtgtgttatttattagtttttgttgatttgtttattattttgtagggtaaaagatgtttagtattatgttaagtgttgaaaatgttgttatggatagttttagtttttaaggagtaaatttttaatggggaatgtaattagataaattagtaatgatataataagagataagtgtttagagggaagtatatggggttgaggatattatgaagtgaatagcgaatttagagttttatgaggtgggaggtagatagtggtaagggataaggtttttgtgtggttaggttaagaaatttattttgagatttgttaggtgttattaaagagttttttggttttgtttttgttttttttttttttttttgagacggagttttattttgttatttaggttagagtgtattggtgtaattttagtttattgtaatttttaattttaaggtttaagcgattattttgttttagttttcggagtagttggggttataggtatatattattatatttgattaattttttttttatttttagtagaaatagggttttattatgttgtttaggttggttttgaattgattttaagtgattttttagttttggttttttaaagtgttgggattataggtatgagttatcgtggttagttatcggttgtttttttgtttgttttttgaggagttttgttttgttatttaggttggaatgtagtggtattattttagtttattgtaatttttattttttgggtataaatgatttttttatattagttttttaggtagttgggattataggtatttattattatgtttggttaatgtttgtattttttggttaagatagggttttattatgttggttaggttggttttaaaatttttgattttaagcgatttattaattttagttttttaaagtgttaggattataggcgtgagttattatgttcggttattaaagagttttaagaatggagtgatagagatagatatggttttttaaaaagttatttaggggttagggtgaaaaatggaaaggagtgagttatagttagattaggaggtagtaaagatggtgtagttagaatagagagaagtgaaaggataaagtagagatataaagagagagggtttataggatatgggtattgattggggggattgtgaagatagagtaagggttaaggttgataggtaggttaggtatagtggtttatgtttgtaattttagtattttgggaggttgaagtgggaggatagtttgagtttagttcgagattagtttggataatatagtgagattttgtttttataaaaaataataaaaaaaaagttaggtatggtgttacgtatttgtagttttagttatttaggaggttgaggtttttaagaggatggttcgagtttaggagataaggttgtagtgagttgtgatagtattattgtattttagtttgggtgatagagtaagattttgttttaaaaaaaaaaattgagaggtgttaggatggtggggttagttattaagaaggaagagtttggttatttgttatttgtttttagatatttagtattggataggtttttaggatttatagggataagatggtatcgtgtttttaattattttatagtagtattgtttatgagaatttttcgtgatgatggaaatatttttggtttgtattgttttatttagtaattatatattatatgattattaagtatttgggtagtataattgaggaattgaatttttgtgggcgaaagattatttaggtgtcgaggtaagagattgaagttataaattgttttagtataataaagaaaatagttagaataagaatagttataatataaattaggtatagagatgattatggataattattaattattattataaatattattaattattagtttttaatattattttttgttgtattgttaatataatttaggaataatcggcgggtatagggttaggtgttgaagggatattgtgagaagtgatttagaaggtaagaggtgagttttttgttaggttcgtataagggtcgtttgagggttttttggttaagcggtaatgttagtgtttggggagatatttattatttagtagatcgcgaaggggagttttttgttaggcgcggtggtttacgtttgtaattttagtattttgggaggttaaggtaggtagattataaggttaggagtttaagattagtttgattaatacggtgaaattcgtttttattaaaaatataaaaaaattagttgggcgtggtagtgcgtatttgtaattttagttatttaggaggttgaggtagaatagtttgaattttggttgggcgcggtggtttaagtttgtaattttagtattttgggaggttaaggtgggtagattacgaggttaggagatcgagattattttggttaatacggtgaaattttatttttattaaaaatataaaaaattagtcgggcgtggtggcgggtgtttgtagatttagttattcgggaggttgagggaggagaatggtatgaattcgggaggcggagtttgtagtgagtcgagattgcggtattgtattttagtttgggcgatagagcgagatttcgttttaaaaaaaaaaaaaaaaaaaaggaaaatagtttgaattcggaaggtggaggttgtagtgagttgagatcgtattattgtattttagtttgggcgaaaaagtgggatattattttaaaaaaaaaaaaaaaagaaagggagttttttttttttggaggcgttagggagtattttgttttattagttttttgtgggaggttggatattatttatgtttgttcgtagttattcggagatttaaatttttttttgtggtgttgtgtttttatggttacgttttttgtttatttttatgtttttttcgtatttttggtttttgtttgaagtttatagatagcggtagaagaaatagtgaaagttttaaagtttttgattttttttataagtgtatagaagaaaacgttgatatatgttgttttttttttttgttttagttatttaaaagggaagggttttttgttttatgattacgtgatttgttttattttattaattatttagaagatttattttttttattttgtttttttgttttatatttaataatagcgtagttaggtattcggggttattattttgtttttacgtttaggtggtagtggtttttcgggtttagttgtttttttttttattttttttttttgtgtttttatttttacgattttttattttcgtatacgaggagaaaaatttataggttttgtaaggtttgattttattaatttttagttttatttaattttaattattttaaatttatttttaacgatatgtggttaatggttattgttgggaatagtatagatttatagtgttattgagaaggtaagttttattagtagaatagttggttatatgtaaatagatggtggtgtttaggtttttttttatatttgttgaatattttaggaggttaatattgtgttaaatgtattgttttattttttttttttttaataattttatagagttaaattagaattttttaattttttagggtaaaaaattttagggaaattgagttatagggtttttttgtttgtttggtttattggttgtggttttttataatttgttaatatgtaataaggttaggatgagagtttagatttaattggttttaaaatttgtttgttttttagttatattgaatggtaaaatggtaatttgtggtttttataaggtttttaaaaaatttttgaatttgttgttaatattttaagttagggaatttgatagaggaattaagatttttagttttttttttaagatgtgaaagttgggtcgggtatagtggtttatatttgtaattttaatattgaggtaggagaattatttgaggttaagagtttgagatttatttaggtaatatagtaagatttttatttgtataaaaaaaaaattttttttaattagttaggtatggtggtatgtgtttaaagttttagttgttttaaaggttgaggtaggaagattatttaagtttaggaggttaaggtcgtagtgagttatgattttatttttgtattttaggttgggtaagagtgagattttgttttaaaataagtgtaagatgtggtaatattgggttatttgttgatatggttatatttagttggagacggagggtagtgtaaaggttatttattatgacgtttatttattggttttttatgggtatttgagtttgtgattttcgtgaatatttttgaaggtaaggattgtggttttaaattattattgttttttagtaggggttatatagaaggtataaaatttattttattattaatgaataattatttatatgatatttaattatttaaagattttttttttgggttagggtattggttagggatatttagttagttatttatatttattgtattttatggtaggaaatattttttgtatttttataggtttgtgatgagggttaaatgagataaagatgggaaagtgtttttaaataaaattttaaatgtttgattttattattttttattttgtattaggtttttttatttttaaaattttttaataaaatataaattgaatatagaaggggttggttaaagagggtagggtacgttgatttttcgttttgtgtttagtattatagttttatattcgttattttatttagtttttatgatagtattatttttatttttattttatagtttagaaattgtggtttaaagagggtaagtgattggtttaagaatacgttgttaggtagtttgatgttaaagtgggttttcgaaatttttatgttagaaaagtaaaaacgtatacgttttttttttcgtaagtattaacgtaaattaaaatggagattaattatgaagaatttttgagtagataaaattaattaggtattttaagtgatttaaattttgtttaaattgtaaatataagtaaaatttaatttgggttatatttgataaatgtttatgttagagagaaataaaatttaagattagttaaaagtagttaattaatagattttaaaaaaaaaaggtaattttgtaattgtaaattaattaaataatttttttattttgtttttatatttttttaataaatatttgtttttgacgttttgttattgtaatattaaagtttttttagtttgatgttttttaatttatgaattgttttttatttaaagtttttaagatgtgttttatattttttttttatataagaaatataagtattaatagtgtacgttgattgagtatggtatggaatcgttttagcgaatattcgattaagaggtgtttgggattttttggtttcgttgaggggtttgaagttatagggaaggttaggttttcgtataacgttttttcgaggggcgtggggattcggtcgtgtagcgcggggatagggggtcgggggcgtatttggatgttttcgattatatggggtttgaatagttcgcggtttagtagggcgttttagagttggtttatttgtagtttttttattagtcgtagtcggtatcgtcgtaggagtcgtcgattcgtttcgtttatggcgagtagttaattaagattttaggtcgttttagttcgttttcgggtttcggtcgttcgttttagtttttaggattcgttttcgttttagggtttgttttcgcgttacggtttcgggttagttttcgttttttatcgttttcggacgtatttttaaggtttcgtttcgtttttaggagtcgtttttgcgttatcgtttcgtttttaggacgtatttttgcgtttcgtttcgtttttagggttaagttttttattatcgcgtcgttttagaatacgtttcgcgttatcgtttcgttttagaattcgttttacgttatcgtttcgttttagaatttattattgcgttttcgttttagaattcgtttcgtattttcgtattgattttacgttatcgtttcgttttcgcgttatcgtttcgttcgtaggacgtatttttaacgtttcgtttcgttttaaggattcgtttttgcgttatcgtttcgtttttaggacgttttcgcgtttcgttttgtttttagggttaattttggggttatcgtttgtttttagaatttgttatcgcgttatcgtttatttttcgggacgtatttagaaggtttcgtttcgtttttaggattcgttttgcgttatcgtttcgtttttaggacgtattttagcgtttcgcgtcgattttagaatttatttcgcgttatcgtttcgtttttaggatttaatttacgtttttatttcgtttttaaggttaattttgcgttatcgtttcgtttttaagggttagtttcgtgttatcgtttcgtttttaagagttaatttttttttttcgttttatttttagaatcgtttttgcgttatcgtttagttttagattttagttcgtattttcgtttcgtttttaaagttaatttttatttttaggatttatttttttgttatcgtttcgttttaaggcggtattttcgcgattcgtttcgtttttagggtttcgtttcgttttcgtattatttttttatttcgggcgtaggtgtttttttgtaattttggtattagtttttggtttatcgcgggtttttcgttagaatttattatagtttcgtttttatagagattcggagggagtcgttatatttttagtaagagggaaattatgagtggagtcgtgatttgtttcgtttatttaatttttttcggggtatggtttttttttagtttttttttttattttaagtaaaattataagttttttttatcgtttttgtgtttagatcgtagttgattgttttaaattcgagtgtttgatttaattaagtttattttatatagttttttattttttttttttttttttttattttaatattttttatatagaaaaaaaaaaaaacggtagaaatttagttttgtaaatttttatcgttttgaacggtttatttttatattttaaaaataatcgtttttgtttattgagtatttgttaagttttaggtatcgtgttagttattttttatgtttattttatttatttttaattataattttgttaggaaagtatttttatttttcgtcggttttatagatgtagattttagggtttagggaaacgaatgtttaaggttatttgggtattaagtggtcgaggtaggtaggattgaaattcgaatttgattttgtaagttatatttttaagaatttattttagaatataattttttgagtattaaaattttagttttattcgtttatttttacgaatatttattgagtttgtagttaaatattaagaatatgaaggtgaataaaataaaatttttgtttttagagtttatattttagtggaaggattaggtgataaattatattaataaataagatatattatgttagatagtgataaatgtaaagagaaaaaaataaaaataagatagggagatatgaaagttttttatattcgtaagggatttattttattggtttaaagaaagttttttttatttatttgtgttttattt

SEQ ID NO: 119 - DNA, 1630 bp, Artificial Sequence
  chemically treated genomic DNA (Homo sapiens)
gagttcgagttacgttatgttcgttgtacgtgttagtttgcgtagtatattagggcgttggtttttttttttttttttggagtgaaatatattaaagggcgcggtgggggtggggggtgacgggaggaaggaggtgaagaaacgttattagatcgtattttttgtaaagatagttttgatttaaggatgcgttagagtacgtgttagggtcgatcgtgttggcggattttatcgtagtcggtttttagggagaaagtttggtagagtgaggcgcgaaatcggagggtcggcgaggatgcgggcgaaggatcgagcgtggaggttttatgttttcggggaaaggaaggggtggtggtgtttgcgtagggggagcgagggggagtcggatttaattttttattcgttttttttttttttcgggttattttttagaaagttgtatcggtgtggttacgtttagcgtagatatttcgggcggtttgttagtagatgtaggggcgaggaagcgggttttttttgcgtggtcgttgggcgggggaatcgttgggagttttgttttcggtttgcggcggttttagacgttgtatcgcgtcgttttacgggtttcgaagagtttttagaaatacgatggtttttgttcgaggattatattttatttttttagagaagtatttttttttttttttaatatttattttttttttttttttttttttttgtatatattttgtaggggggggtagaagggacgttgttttggtttttttaatcggggttttcgaaatagtttcgaagttattaggaatatagattttagggatatgatttttatttttgggtatgcgaggttgttattttttaaaattatttttttttttattttttatttaagggatttatttttaaattgtttgaggttattttatttttagataatttattttatatttttggattttaaatataagggtaggaggattaggattcgttttgaagaagttaaagttggagggtcgtattttggcgtgttatatttatagaatgagtgaaattagagggtagaaataggagtcggtagttttttgtgggttgtttgttcggggtttttggtatgtaggttggatggagggagaggggtggggggtggcgggggatcgcgtttgaagttgggtcgggttagttgttgttttttttaataacgagaggggaaaaggagggagggagggagagattgaaaggaggaggggaggatcgggaggggaggaaaggggaggaggaattagagcggggaggcgcggggagagggaggagagttaattgtttagttagtttgcgttatcgttttagagcggagaagagcgagtaggggagagcgagattagttttaaggggaggatcggtgcgagtgaggtagtttcgaggttttgttcgtttattatttaattttcgttttttttttgttttattttttttttttgtttttatttttttttcgaaaattttttatttagttaaaggaaggaggttaggggaacgtttttttttttttttttaaaaaataaaaatagaaaaatttttttttaggtcggggaaagtaggagggagaggggtcgtcgggttggttatggag

SEQ ID NO: 120 - DNA, 1630 bp, Artificial Sequence
  chemically treated genomic DNA (Homo sapiens)
ttttatggttagttcggcggttttttttttttttgtttttttcggtttggaaaagggtttttttgtttttgttttttggaaggggaggggagagcgtttttttgattttttttttttggttaaatagggggttttcgggggagaggtgagggtagagagagaaggtggagtagaagggaggcgaggattgggtggtgggcgagtagagtttcggggttgttttattcgtatcggttttttttttaaaattggtttcgtttttttttgttcgttttttttcgttttgaagcggtgacgtaagttggttgggtagttagttttttttttttttttcgcgttttttcgttttggtttttttttttttttttttttttttcggttttttttttttttttttaattttttttttttttttttttttttttttttcgttattaaggagaatagtagttggttcgatttaattttaaacgcggtttttcgttattttttatttttttttttttatttagtttgtatgttaggggtttcggataggtaatttataaaaaattatcgatttttatttttgttttttaattttatttattttgtaggtgtagtacgttaaaatacgattttttaattttggtttttttaaaacggattttaatttttttgtttttgtatttaagatttaggaatgtagggtagattatttgaagatggggtgattttagataatttagaaataggttttttaagtgaaaaataagggagggggtgattttagaaaatagtaatttcgtatatttagagataaaggttatgtttttgaagtttgtgtttttgataatttcgaagttgtttcgaaagtttcgattaaagggattagaataacgttttttttgtttttttttgtagagtgtgtgtagaggaagaagagggagggagaggtgggtattaggaaggaaggggggtgtttttttggagggatagaatgtgattttcgagtagaaattatcgtgtttttgggggtttttcggggttcgtggggcgacgcggtgtagcgtttagggtcgtcgtaggtcgggggtagggtttttagcggttttttcgtttagcggttacgtaggaaaaattcgttttttcgtttttgtatttgttgataagtcgttcgaggtgtttgcgttgagcgtggttatatcgatgtagttttttaggaaatggttcgggagggggagggggcgagtgagggattaggttcggttttttttcgttttttttgcgtaaatattattattttttttttttttcggaggtatgaggtttttacgttcggtttttcgttcgtattttcgtcgatttttcggtttcgcgttttattttgttaggttttttttttgggagtcgattgcggtgaagttcgttagtacggtcggttttgatacgtgttttaacgtatttttgagttaaggttgtttttataggagatacgatttggtggcgtttttttattttttttttttcgttattttttatttttatcgcgttttttggtgtattttattttaggaggaaggggagagattagcgttttgatgtgttgcgtaagttggtacgtgtagcgggtatggcgtggttcgagttt

SEQ ID NO: 121 - DNA, 3664 bp, Artificial Sequence
  chemically treated genomic DNA (Homo sapiens)
gaatttttaattattattttgtttttttatttttaatatttttagcggtaattgtattttatttatttttgtgtttatgaagtatagtgttgtattttggagatattatatagaagttggtttaaagggtaataaattgtatttgttaagatgatagtatggatttataataatttttgaaattttataaagaaagatgattgagttaaattgatatatttagtattatagttgtggaagtttgtggttttttttatgttaaaggtaaaatggatataatgaattagttgttatttttagatgatatagaagttgaattttttttaagttttttaaagagaaagatatattaaaatttattaaaattagtattataaattgtatagaatagtttggttttttagagtatttttttggggtagtgagtttttatttaaaaaatgaagtttggattttaaatataagttttaaaagtgattaggttttagtaggagtttttaaatttttatttatattatgatttttaaatgttttgtttttgttgtttaggaataaaaattgttaaggttgagttagatgtaatgtataatattagatgatagatgtagtttattgtgttaaaaggtgttaaatatttaagtgtatgtgatatattttatattataagggtaaggaagttttattttatattttgatttgggttttttaatatatatttgtagtggatgtggtaattagtttttgttttatgttttattaggattaatgtaattagaaatttttaaaatggatttttattatgtttagttttgttttattgttttatttgtttattttaaaaagattttagaatggtgtttaggttgggttggtggtttacgtttgtaattttagtattttgggaggttaaggtaggaggattgttggagtttaggagttggagattagttagggtaatataaggagatattgttttcgtaaataaatagaaaaaaaaaaagtaagaaagaaagagagaaagaaggaaagaataagaaaaaggaaaaaaaaattaattgtagtaagtgtagaaattttttttaaggatatgatggatggtaatgaagatagagtttttgatattggattatttaaagtataatttaagtttttttttttttttttatagaattgtgaatttttgtgttttaattatatttaagttaggcgtggtggcgagtgtttgtagtcgtagttgcgttggaggttgaggtcgattgtttgagtttaggatttggaggttagtatgcgtaatataatgagatttagtttttaaatgtatgtttttttttatatatttaaaattttgatgtgaaaatattttaaaatttaatatattttaaatgtttttaattgtataataaataaaatgtaaataataaaataatttaatattaaatttaaaaatgaggtagaaataaagtatagcgatataaataataaatttttttttatatttttgaggcggttttttgagttttttattttttttttaaggttattgaaatgtgttttttggagttagttcgtaaattacgtatttagaaaaatataattatatatttttaattttaagtattagaagtgaaagtaatggaatttcgatgtaaatataatattatttttttgatgagttattttgagtataataaatttgaattgtgttaatgttgggagaaaaaatttaaaagaagaacggagcgaatagtagttttttgtttcgttgattagaaatagtaggacgatattttttcgattggaggagagcgtttgcgttcgtatttagttggcgttcgtttttttgttttttttttagtcgtttttttttttttttttcgcgttttagttattcgggaaggtttgtttagcgtagttgggttttgattggttgttttgaaagtttacgggttattcgattggtgaattcggggttttttagcgcggtgagtttgaaattgttcgtatttggttttaaagttggtttttggaaattgagcggagagcgacgcggttgttgtagttgtcgttgcggtcgtcgcggaataataagtcgggtatagtggttggggttagggtcgtgtttaggggacggtcgagggtttcggagggcgagtattgaggaacggggttttttaagaaggtcggattggaggttagggatttgcgcggggttcggttgggtttcggggggcggtgggtagggttttcgtttgggtttggtcgtgtgagttatattgggttggttttagagggaggttatgggagtttagtttggcggggttaggcggcgtgggggtgggggttcggggttgtagttatgagtcgaggtcggttgtttttaggaattgtttgaagaggttttcgggttttgattgaagtaaaattcgtttttttacgttgagcgtttgcggagtagtaggtttttttttgggttcggtttttgcgcgttttgttatttcgtttcgggggtgggaaagtgggatcgtatttgggttaggtataggcgcgggtttttagagttaggtcgttttgagaaatcgattttggaattcgtgggtttttttgggtttgttttgtttacggtttcggtttatttggagttgttaagaatagttagtttaggtatttaatttttatgagtagtgtagtgtagttttttttatttaaaaagatatatttttgtttttttttggattgatttttttttgaagatgaatgtgagaaatagaatttaaaggtttattttgagtgtgttttataaatgattttattattagtgatgggtgttagaaaaatttaggtaattatgtttggagttttgacgttttattggtaaattttagaggaagttttgaatttttggttgttagtttttttttttaatttatttattgtgatttaagtatatcgtttttttgtttagtttttgatattgtttaggttataattagaattttatttgtggaattgtattttttatttttttgttttacggtgtttaagtgatattttttatttttggaaaaagtattttgaaagttttgagtatgtttgtttgtgattttagtaagtagaggaaaaagattaaaattgttacgtgggtaattgtaaatatttaaaatgtttttgtcgttttaaataaaatttttttaatgaatagtttgaatatattttagttttgtttttataattttaaaaaataatgttttgaataaaattaggagtattataaagcggtataaatttgttgaaatatttgggtataattttggtatacgtaggtattattttaaagtgttataaaaagggaatataattttggtttttgtttggaaagaatagataagttgatatttgaatttgagggttattttgattggaagaagttaaatattatattagtatagaatatatacgtttttaatgttttaggagttaagaaggatggaaagttattgtaggagtttttatttttgtaaatattgtttgaatgtaattaatatttatggaatatttatgttgtagtaggtattgtggaaaatgttttatatatagtgttttattaatgtttaaaattattcgagttagtggtatgtaattaagttagttttttttttattttagg

SEQ ID NO: 122 - DNA, 3664 bp, Artificial Sequence
  chemically treated genomic DNA (Homo sapiens)
tttaaagtgaaggaaaaattgatttaattatatgttattaattcgagtagttttaagtattaatgaaatattatatgtaaagtattttttatagtgtttattgtagtataagtattttataaatattaattatatttaaataatatttataagggtaaggatttttataataattttttattttttttgatttttgagatattggaaacgtgtatattttatattagtgtagtatttagttttttttaattaaaataatttttaaatttaggtattaatttgtttattttttttaaataaaaattagaattatgttttttttttgtgatattttaaagtagtatttgcgtgtgttaaagttatatttaaatattttaataaatttatatcgttttatgatatttttaattttatttaaaatattattttttaaagttatgaggatagaattaaaatgtgtttagattgtttattaggaaaattttgtttaaaacgataaaaatattttaagtgtttatagttgtttacgtgataattttaattttttttttttgtttgttgaggttatagataaatatgtttaagatttttaaggtattttttttaagagtaggaaatattatttaagtatcgtaaaataaaagaatgaaaagtgtaattttatagataaaattttaattataatttaaataatgttaaggattaagtagaaaaacggtatatttgaattataatgaatgggttaaaaaaaaaagttgataattagaagtttaagattttttttgaagtttgttaatgaaacgttagaattttaggtataattatttagatttttttaatatttattattgatgataaaattatttataaagtatatttagaatagatttttaagttttattttttatatttatttttaaagaaaaattaatttagaaagaagtagagatgtatttttttaaatgaaaaaaattgtattatattgtttatgagagttaagtgtttgggttgattgtttttaatagttttaggtgggtcggggtcgtgggtagagtaagtttaagaaggtttacgagttttaggatcggttttttagggcggtttggttttagggattcgcgtttgtatttggtttaggtgcggttttatttttttattttcgaggcgggatggtagggcgcgtaggggtcgggtttaggaaagagtttgttatttcgtaggcgtttagcgtgggggagcggattttgttttaattaagattcgaaagtttttttaggtagtttttgagaatagtcgatttcgatttatgattgtagtttcgaatttttatttttacgtcgtttaatttcgttaggttgggtttttatagtttttttttaaagttagtttagtgtggtttatacggttagatttaggcgaaggttttgtttatcgtttttcgaggtttagtcgggtttcgcgtagatttttgatttttagttcggtttttttagaggatttcgttttttaatattcgtttttcgaggttttcggtcgttttttagatacgattttgattttagttattgtattcggtttattatttcgcggcggtcgtagcggtagttataataatcgcgtcgtttttcgtttaatttttaagagttagttttgaagttaagtgcgagtagttttaaatttatcgcgttaaagggtttcggatttattaatcgggtagttcgtagatttttaaagtagttaattagagtttagttacgttgggtaggttttttcgggtggttagagcgcgaaagaaagaggaaagggcggttagagaaaaagtaggagggcgggcgttaattgagtgcgagcgtaagcgtttttttttagtcgggagagtgtcgttttattgtttttagttagcggagtaggaagttattgttcgtttcgttttttttttaaatttttttttttagtattggtatagtttaaatttattatatttaaaatagtttattaaaaaagtgatattgtgtttatatcgagattttattatttttatttttaatatttagggttaggagtgtatagttatgtttttttaaatgcgtgatttgcgggttggttttaaggagtatattttagtgattttaagaaggaaatggaaaatttaaaagatcgttttaaaaatgtaaaggaaaatttattatttatatcgttgtgttttgtttttattttatttttgaatttaatattaaattattttattatttatattttgtttattatataattaaaaatatttgaaatgtattaaattttaaaatatttttatattagaattttaaatatatagagagaggtatgtatttagagattgggttttattatgttgcgtatgttggtttttaaattttgggtttaagtaatcggttttagtttttagcgtagttgcgattataggtattcgttattacgtttggtttaaatataattaaaatataaaaatttataattttatgaggggagagaaagaggtttaaattatgttttaaataatttagtgttaaaaattttgtttttattgttatttattatatttttgagagagatttttgtatttattgtagttaatttttttttttttttttttgtttttttttttttttttttttttttttttattttttttttttttgtttgtttgcggagataatgtttttttatgttgttttagttggtttttaatttttaggttttagtaatttttttgttttggttttttaaagtgttgagattataggcgtgagttattagtttaatttaaatattattttaaaatttttttaaaataaataaatagaatagtaaaatagagttagatataataaaaatttattttaaggatttttggttgtattgattttaatgggatatagaataaagattgattattatatttattataagtatgtattagaagatttaaattaggatatggaatggaatttttttatttttgtgatatagagtatattatatgtatttaagtgtttaatattttttaatataatgagttgtatttattatttggtgttatatattgtatttggtttaattttgataatttttgtttttaggtaatagaggtagagtatttgggagttatggtgtaggtaggaatttaagaatttttgttggagtttaattatttttaaaatttatgtttaaaatttaaattttattttttaaatgaaaatttattgttttagagaagtgttttagggaattaggttgttttgtgtagtttatggtattggttttaatgaattttaatatgtttttttttttgagaggtttaagaggaatttaatttttatattatttaaaaatggtaattaatttattatatttattttatttttaatataaagaagattataagtttttatagttgtgatgttaggtgtattaatttaatttaattatttttttttataaagttttagaggttattgtaaatttatgttattattttggtaaatatagtttattattttttgggttaatttttatgtagtatttttaaagtgtaatattgtgttttatagatataaaaatgaataagatatagttatcgttggaggtgttgagggtaggggagtaggatgataattgggaattt

SEQ ID NO: 123 - DNA, 6621 bp, Artificial Sequence
  chemically treated genomic DNA (Homo sapiens)
tttgtatttttagtagagatggggttttttttttttttttttttttttttttgagagggagtttcgtattgttatttaggttggagtgtagtagtgttatttttatttattttaattatcgttttttaggtttaagtaatttttttgttttagttttttaagtagttgggattataggtgtttattattacgtattattaattttttgtatttttagtagagatggggttttattatgttagttaggttggttttgaatttttgattttatgatttatttatttcggttttttaaagtgttgggattataggcgtgagttattatgttcggttaagatggtgttttatcgtgttggttaggttggttttgaatttttgatttcggttttttaaagtgtcgggattataggtgtgagttattgtgttcggttaggagttttattgtgaagggaaggaatgaatatagttggaggggaaagtggtattaaggaaaggttttttattattaataataaatattttattgaaatatattatttatatagaatagttaataaattttgagtgtgtagtttaatgaatttttataaggtgaatatatttaggtaattagtatttagattaagaaatggaaagtggttaggtgtagtggtttatgtatataatgttaatattttgggagtttaagacgggaggatcgtttgagttcgagagtttgagattagtttgggtattatagttagattttcgtttttaaaattatatatatatttttttttgagatagagttttgttttgttgtttaggttggagtgtaatggtatgattttagtttattgtaattttcgttttttgggtttaagtgattttattgttttagttttttaagtagttgggattataggcgtgtgttattatattcggttaattttttgtatttttagtagagacggagttttgttatgttggttatattggtttcgaatttttgattttatgatttatttatttcggttttttaaggtgttgggattataggcgtgagttattatgtttagttaaaataaaaaataaaatttttaattagttaggtttatgggtgtatgtttgtagtttaggttatttaggaagttgaggtgggaggattatttgaatttagaagttcgaggttatagtgagttatgattatgttattgtattttaatttgggttatagagtaagattttgttttaaaaagtgaaaaataaataagaaatagaatatgattagttgttaatattttttttatggttttttgtagttattattatttttttgaaaggtaattagtattataattaattttttttttttttgagacggagtttcgttttgttatttaggttggagtgtagtggtttaatttcggtttattgtaatttttattttttgggtttaagtaatttttatgttttagtttttatagtagttgggattatagttgtgtattattatatatggttaatttttgtgtatgtatatatgtgtgtatatatatgtttgtgtatattatatgtgtgtatatatgtatattatatatgtgtgtatatatgtatatatatatatatatgtatatgtatatatatatatatatgtatatgtatatatatatatatatgtatatgtatgtatatatatatatgtatattatgtatatatatatatgtatgtatattatgtatatatatatatatatatgtgtgtgtgtgtatatatatatatatttttttttagtagagatgaggttttattatgttggttaggttggtttcgaatttttggttttaagtgattcgtttgttttagttttttaaagtgttgggattataggtgtgagttagatttaaatagtatgttttttttgtgtttttttttttatgtttgatagttgatgtgagatttatttttattgtgggtagcgtttttgttttttttattattgtataaaataattttgttttatttatttattttattgttgatgggtattagggttgttttttgtttggagttaaaatgattaatatggttatgaatatttgtgtatatgtattttggtatatttgaattgtattgtagtttttgtgttaatttttttttttttatggttttttgtggttattttttcgtttttttatatgatttttatagttgtttgtgattttattttggttatttttagtgatttttttgggtgtatttttgaattatggattcggttatttttttgtggtttttattttagttttagttttgcggttttgttttattatattaagtttttaatgttggtgttttttagatttagggttttaaaaattttttgtatatttttaatgggtattattatttttatgttaattaatattaaatttgttttttgattatattttttagttagtttattagtataaaattgagtttattaaatttttttaagaagtatgtttttaattgttgaaatgttatatttatttaggtatttgaattattatttaagaattattttagtttttttttttttttttagttttttataattttaatttttaattattaaaatttgatgagatttattttttttagggtttatagaattattttttttttttgtttttaaggtttttattttgttttagaattttttagatttttgagatagttattttttttttttttaggtttttttatttttttttattgatttattttaaagtaaatttgattcggttattatatattttttattgtttataggataaggttaaattttttagtaaattttaatttttttaagaattgttttttatagttagttttatgtgtttattttagaatcgattggattaatttaggagtagttttcggtaagtacggcgtttttttttattttttggttgtcgagggtcgtttttttagaaagtattttttattagttttaagttttttttttttagtaattttgatttttagttttaattttttttaggacgtgttttttatcgtattgttttttttagttttcgttttttttttaggtgtttattatttttttataaattatagttattgttatggtaataattttattattagaaggagttttatgtttagcggattagagttttttgagagtagggattgtggtattattttaagtattgaatttgttttagtaatttttaaataaatatatgttgaatgaatgaatgtagtaataggaatgttgagttaagttttgtttttgttttttgagacggagtttcgttttgttgtttaggttggagtgtagtggttcggttttggtttattgtaagtttcgtttttcgagtttagttatttttttgttttagtttttcgagtagttgggattataggcgttcgttattacgttcggtaattttttgtatttttagtagagtcgggttttattatgttagttaggatggtttcgattttttgatttcgtgattcgttcgtttcggttttttaaagtgttgggattataggcgtgagttatcgttttcggtttgttgagttaagtattaaattatataaaatataggaggagaggaaagtatttagagatacgatagggagaattatttgaaatagtgggattatagattatgtgaattgtgtagagaggtttaaatagtttggggtttttggagggaagggaggtttttgggtggtggagtattggtgtatagaaaaggagatgaattttgagagagaggttttttattgtgaagggtttggtgttggggttaaaggtttggggtttttatttgtttagtatggttttttaaattgtagggttttttttttttgagtggggggtagggggtgttttattttgttgtttaggttggttttaaattcgtgggtttaggtaatttttttatttcgtttttttaaagtgttgggatgataggcgtgagttattaagtttagtagtaggttgtaattaaattatgtatttatggtttttaaaattcgtttaggagttgttataggttcggcgttgtaaaagtaaatatgtttatttagaaaatggggataatttttatgttatagagttgtaaagattaaatgaattaatatagattaatatattgggaatagtgttaagtgtataagtattatgtaaattttagttattatttgttattattgtgtttgttgttatttttttttaggagtttttagggggttaagaagtggtgggaaagaaagaaatgattttaagagtatttaataagggttagaatggaagtgagtaaaaaatgttgaggtttatagtataggttgtattgcggggtttaaattttatgaggttagtagtatttagggtttgtgagttttttagagttgggttttggtggtcgagtttagttttgggggttattgtatttttttttttattataaaatggggtttggaggttcggggcggaagaaaggggtttataatattgtacggttagaggtcgagttaaggttggattcggttagatttttataggttttttttagtttttatattgttttagagtgtggggcgttcggttgggggcgaggtagcggaggtttaaagggggtcgaagttaattggacggtagttcgcgatgggaattacgttttttagtatgcgacggggtaaaggggttttttagtcgcgagtagcgtttcgtaggttttgttgggagtttttattgatttttgtttttttttttattttgattttcgtttttttgttttgggtttcgtttttttttgagagtcgatgatttggtagagtttcgcgagtcgttttttttttttttttttattggtttagtttagttgttattcggttgagaggaggagaagttgtttattgattggtggatttcgtttggcgttaattaggaaaggggggcggggtagtagttggttttattgagtcgttattatcgcgaaaggtcggtttggttgcgatagtttgggtaagaggtgtaggtcggtttggttttttgttattcggagttgggtaagcgggtgggagaatagcgaagatagcgtgagtttgggtcgttgtttcgaggttttcgttcggttttttttgtcgattcgttacgtttgtttggatttaatttttaggttgtcggcgttcgttcgttcgttggtttcgcggtgtgagagggaagtattcgtgtttgtggttggtggttggcgtttggagggttcgtatattcgttcggtcgcgtcgtttgttcgcggtagtcgcgtttttgaatcgcggagtcgtgtttgtgtttgattcgcgggcgtcggtggcgcgcggtcgaggtcggtgtcggcggggcggggcggtcgcggcggaggtagaggaagagggagcgggagttttgcgaggtcgggcgtcgttatggaattgggttcggagttttcgtatcgtcgtcgtatgtttttcgtttgtagtttttttttcgcgtcgtagttcgtcgtgaaggcgttatttggcgttttagtcgtcgggggattgtcgtttgttattaatttgatcgttattatggattagttgtagggtttgggtaggtaaggagagatcggcgggcggtgtttcgggtttttggtttcggtgtcggtttcggagagattaggttaggaaacggatcgggagaagggcgagattcgttcgttcgggttcgtcgttcggggatagtcgggttagggtttgttatgtgtattttcgttcgggcggaatgttgggcgggagaggtcgtcgggattttttaggggaagaggtggagatttttgggtttaagttcgagttaggtttatttttatttttttcggattgtttcgtattttttttttatttttatttttggaagttttttggaatttattttcgcggggaaaattaggtttttttaggtatttatttttattttttgttaaattatttttaggattttcgtttgttgtgatttttgtttttttttaataaaggattatggtatttttttttttggcgtttatgtaaaattattttagtttttcgttttgtgtatatttttgatgtttattttgttgtttttttaaggttaggtttttttatttaatttttagaaagttttttgggttttttttgatagtaaaaaatgtattttacggtgtttttcgcggaagagttattttttttttaatttttggtatttcgtttgttaagtatatgttttgtgcgttttttaatttttgaaaagtagaaagtgttttgtttaatttttatttcgattttgttttagtatttagaatatatgtttttattttaggaaatattttaatatttgttatagttattataatttgtaatgtggtttaaggttatgtttatttatttttttttttttttttgtttaagtgttaattgggtgtttagagtggtaaagtgggatttttgttatttgtggtgtggtttagaaatggtttttggtagtttggttgttttttaattttatggtttattttttgtatgtgattttttaattatattttataaattatttatggtttatttttgttggttttagt

SEQ ID NO: 124 - DNA, 6621 bp, Artificial Sequence
  chemically treated genomic DNA (Homo sapiens)
attgaaattaatagaaataaattatgaatgatttataggatataattaaaaggttatatgtaggagataggttatgagattaagaagtagttaggttgttagaaattatttttaggttatattataagtggtaaagattttattttgttattttgaatatttaattagtatttgggtaaaggagaaaaaaggagtgggtgggtatggttttggattatattgtaggttatgatggttatggtaaatgttggggtattttttaaaataaaagtatgtgttttaagtattgagatagagtcgggatgaaagttgaataggatattttttgttttttagaagttgggaaacgtataagatatgtgtttagtaaacgggatgttagagattgaagggaaagtagttttttcgcgggaaatatcgtgggatgtattttttgttattaggaaaagtttaggaagttttttgaaagttgggtaaaaagatttggttttaggaaagtagtagagtggatattaggaatgtgtatagggcgagggattgagatgattttatataaacgttaggaaagaaaatgttatggttttttgttgagaaggaataaagattatagtaaacgaagattttgaggatggtttagtaaagggtgaaagtgagtgtttagaagagtttgatttttttcgcgggggtagattttaaagagtttttagggatagagatagaaggagagtacggagtaattcgaaaggggtgaaggtgggtttggttcgggtttaggtttaaggatttttatttttttttttggaaggtttcgacggtttttttcgtttaatatttcgttcgggcgggggtgtatatggtaggttttagttcggttgttttcgagcggcgaattcggacggacgggtttcgtttttttttcggttcgttttttggtttgattttttcgaggtcgatatcgaggttaggggttcggagtatcgttcgtcggtttttttttatttgtttagattttgtagttggtttatagtgacggttaggttggtgataggcgatagtttttcggcggttgaagcgttaaatagcgtttttacgacgggttgcgacgcgggaggggggttgtaggcgaagagtatgcggcggcggtgcgggggtttcgggtttagttttatggcggcgttcggtttcgtagagttttcgttttttttttttttgttttcgtcgcgatcgtttcgtttcgtcgatatcggtttcggtcgcgcgttatcggcgttcgcgggttaaatataaatacgatttcgcggtttagggacgcggttgtcgcgggtaagcggcgcggtcgggcgggtgtgcggattttttaggcgttagttattagttataggtacgggtgttttttttttatatcgcgaggttagcgggcgggcgggcgtcggtaatttgaagattaaatttaaataaacgtggcgggtcggtaagagaagtcgggcgagagtttcgaggtaacggtttaggtttacgttgttttcgttgtttttttattcgtttgtttagtttcgggtagtagaaaattaagtcgatttatattttttatttaggttgtcgtagttaggtcggtttttcgcggtaatagcggtttagtggggttagttgttgtttcgttttttttttttagttggcgttaaacggaatttattaattagtaagtaattttttttttttttaatcgaatggtagttaggttgggttaatgagaggggaagaagaaagcggttcgcgggattttgttaggttatcggtttttagaagggggcggagtttagagtagaagagcggggattaaaatgagagggggagtagaggttaatgaaaatttttagtagaatttgcgaggcgttgttcgcggttgaaaggtttttttgtttcgtcgtatgttgggaagcgtagtttttatcgcgagttgtcgtttagttagtttcggttttttttgggttttcgttatttcgtttttagtcgggcgttttatattttgaggtaatgtggaggttaaggaagatttgtggaggtttggtcggatttagttttggttcggtttttaatcgtgtagtattgtggatttttttttttcgtttcgggtttttaggttttattttataatgagggagggaatgtaatgatttttaggattggattcgattattagggtttaattttggagggtttatagattttgggtgttgttggttttatgggatttgaatttcgtagtataatttgtgttgtgggttttagtattttttgtttatttttattttagtttttattggatgtttttagaattattttttttttttttattattttttagttttttgggagtttttagagagaaataatagtaaatataataatagtaaataatagttaaagtttatataatgtttatgtatttgatattgtttttagtgtgttaatttgtattaatttatttaatttttataattttgtgatataggaattatttttattttttaagtgggtatatttatttttatagcgtcgaatttgtggtagtttttagacggattttgagggttataagtgtatgatttaattgtaatttattgttgggtttagtggtttacgtttattattttagtattttgggagggcgaggtgggaggattgtttgagtttacgaatttgagattagtttgggtaataaagtgagatattttttgttttttatttaaaaaaaaaaaattttatagtttgaaaagttatgttggataggtggaaattttaaatttttggttttaatattagattttttatagtgaggaattttttttttaggatttatttttttttttgtgtattagtgttttattatttaggaattttttttttttttagaaattttaggttatttaggtttttttgtatagtttatatggtttgtggttttattgttttaaatagttttttttgtcgtatttttgaatatttttttttttttttgtgttttatgtggtttaatatttggtttaataggtcgggagcggtggtttacgtttgtaattttagtattttgggagatcgaggcgggcggattacggggttaggagatcgagattattttggttaatatggtgaaattcggttttattaaaaatataaaaaattatcgggcgtggtggcgggcgtttgtagttttagttattcgggaggttgaggtagaagaatggttgaattcgggaggcggagtttgtagtgagttaagatcgagttattgtattttagtttgggtaatagagcgagatttcgttttaaaaaataaaaataaaatttggtttaatatttttgttattgtatttatttatttaatatatgtttatttaaggattattagaataaatttagtgtttgaaataatattataatttttgtttttagggagttttggttcgttgagtataaagttttttttaataatggaattattattatgataatagttgtggtttgtggagggatggtgggtatttagaggaggggcggggattggggaaggtagtacggtggggggtacgttttaaaggagattaaaattaaaggttaaggttgttggagaaggggagtttggggttggtgggaagtgttttttaaggaaacggttttcggtagttaggaggtgaggaggaacgtcgtatttgtcgggagttatttttgagttgatttagtcggttttagaatgggtatatgggattggttgtgagggatagtttttgaaaggattggagtttgttgaagagtttggttttattttgtggatagtggagggtgtgtgataatcggattagatttgttttagggtggattagtggaggagagtggggaggtttgaggaaaaaggaggtggttgttttaaaagtttgggagattttgaagtaaggtgggggttttggagataaaggaagggaatgattttgtgagttttgaaggaggtagattttattagattttgataattgagagttaagattgtagggggttagagggaagggaggaggttagaatgatttttaggtaatgatttaagtatttgggtggatgtaatattttaataattggaggtatattttttggaggaatttgatgagtttagttttgtgttggtggattggttggggggtgtagttaggaggtagatttggtgttgattagtatgaagatggtaatgtttattgaggatgtataaagggtttttaggattttggatttggggagtattagtattgaggatttgatgtagtgagataggatcgtaaagttggggttgagatagaaattataagggagtagtcgagtttatagtttagaggtgtatttaggagagttattgaaggtggttagaatgaggttataggtaattatggaaattatgtaggaaggcgaggaggtggttatagaaggttatgggaagggaaaagttggtatagaagttataatatagtttaagtgtgttaaaatgtatgtatataaatatttatggttatgttaattattttagttttaaatagaaagtaattttaatgtttattaataataaaatgggtaaatagaataaagttattttatatagtgatgaaaaggatagaagcgttatttatagtaggagtgaattttatattaattgttaaatataagaaggaagatataaaagagatatgttgtttaggtttggtttatatttgtaattttagtattttgggaggttgaggtaggcgaattatttgaggttaggagttcgagattagtttggttaatatagtgaaattttatttttattaaaaaaaaatatatatatatatatatatatatatatatatgtgtgtatatatatataatatatatatatgtgtatatatatataatatatatatatatgtgtatatatatatatatatatatgtatatatatatatatatatatatgtatatatatatatatatatatatgtatatatatatatatatatatatatgtaatatatatatatatatatatgtaatatatataaatatatatatatatatatatatatatatataaaaattagttatgtatggtggtgtataattgtaattttagttattatggaggttgaggtatgagaattgtttgaatttaggaggtggaggttgtagtgaatcgagattgagttattgtattttagtttgggtgatagggcgagatttcgttttaaaaaaaaaaaaagttagttatggtattagttattttttagaaagatggtggtgattgtaaggggttatgaaggggatattggtaattggttatattttgttttttatttattttttattttttgagatagagttttgttttgtggtttaggttggagtgtagtgatatgattatggtttattatagtttcgaatttttgggtttaagtgatttttttattttagttttttgagtagtttgaattataggtatgtatttataaatttagttaattaaaaattttattttttattttggttgggtatggtggtttacgtttgtaattttagtattttgggaaatcgaggtgggtggattatgaggttaggagttcgagattagtgtggttaatatggtaaaatttcgtttttattaaaaatataaaaaattagtcgggtgtggtggtatacgtttgtaattttagttatttgggagattgaggtagtagaattatttgaatttaggaggcggaggttatagtgaattgagattatgttattgtattttagtttgggtaatagagtaagattttgttttagaaaaaaatatatgtataattttagagacgggagtttaattatgatgtttaggttggttttaaattttcgagtttaagcgattttttcgttttggatttttaaagtgttagtattatatgtatgagttattgtatttggttattttttattttttgatttgggtgttggttatttgagtgtgtttattttgtggaaatttattgagttatatatttaagatttgttagttgttttgtatgaatggtgtattttaatgaaatgtttattattagtgataaaaagtttttttttgatgttatttttttttttaattatatttattttttttttttatagtaaaatttttggtcgggtatagtgatttatatttgtaatttcggtattttgggaggtcgaggttaggagtttaaaattagtttggttaatacggtgaaatattattttggtcgggtatggtggtttacgtttgtaattttagtattttgggaaatcgagatgggtggattatgaggttaggagtttaagattagtttggttaatatagtgaaattttatttttattaaaaatataaaaaattagtggtgcgtggtggtgggtatttgtaattttagttatttgggaggttgaggtaagagaattgtttgaatttgggaagcggtggttgaagtgagtggagatggtattattgtattttagtttgggtgatagtgcgagatttttttttaaaaaaaaaaaaaaaaaagaaaagaaagttttatttttattaaaaatataaa

SEQ ID NO: 125 - DNA, 2976 bp, Artificial Sequence
  chemically treated genomic DNA (Homo sapiens)
gaggttgaggtaggtggattatttgaggataggagtttaagattagtttggttaatatgatgaaattttgtttttattaaaaatataaaaattagttagtcgtggtggcgtatgtttgtaattttagttatttaggaggttgatagaggagaatcgtttgaatttaagaggcgaaggttgtagtgagttaagaatatattattgtattttagtttgggcgatagagtaggatttcgttttaaaaaaaaaagagttggttagtgttaaatgtttagtatagagattggtatagtaatttttaatgtttagtatttattgttattattttttttttttttttttttttgagatagagttttgttttgtcgtttaggttggagtatagtggcgcgatttcggtttattgtaagttttattttttaggtttatgttatttttttgttttagtttttcgagtagttgggattataggcgtttattattacgtttggttaattttttgtatttttagtagagacggggttttattgcgttagttaggatggttttaattttttgatttcgtgatttgttcgtttcggttttttaaagtgttgggattataggcgtgagttattatgtttggttttattgttattatttttattttttatttttgtatagagtatttatggtttaagaaatatttgttattttaattgtatgggagttttataatagtatagggagatatttttgattattatttttattaggagggtggagaaattgaggttttgggaggtggttttgatttagggaattaatttgttgatttattaatttatgaagttttatagttaaaaaagattagattaaaaaatgagaatttagtaaaggggttgaggtaggaggatcgtttgagtttagaaatttgagattagtttcggtaatatagtgagattttttttttagaaaaattttttaaaaaattaggtcgttcgaggtagagtgtagtggtttacgtttgtaatttaatattttaggaggttgaagagggtggattatttgaggttaggagttttagattagtttggttaatatggtgaaatttcgtttgtattaaaaatataaaattagtcggtgtggtggtatacgtttgtagttttagttatttaataggttgagataggagagttttttgaattcggtaggcggaggttgtagtgagtcgagatcgtgttattgtattttagtttgggtaagatagagcgagatttcgttttaaaaaatataaataaaataaataaataaaaaattaggttgttagtttagtggtttatggtttatatttgaaattttagtattttgggaggttaaggtaggaggatcgttttagtttaggagttcgagattaggttgggtaatatagggagatatagcgtttttattgtttttgttcgtttcgatttgtttttttataaaaaggtaaaagaaaaaaaaattagtttggcgtggtggtgtgtatttgtatttttagttattagagaggttggggttagaggatcgtttgagtttaggagttcgaggttgtagtgagttgtgatcgtattattgtattttagtttgggtgaaagagtgagattttatttttaaaacgaataaataaaaaattttaaaaaataaaagaatttagttaagtgtaaaagttttttttgattttaggttttagtgagttatcggcggggttgggattcgaatttagtggaattagaatcgtgtaggttttataatttatttagattttagtaattttaggttagagggttatcgcgtttatgcgaggtcgggtgggcgggtcgttagtttcgttttggggaggggttcgcgttgttgattggttgtggtcggtaggtgaatttttagttaattagcggtacggggggcggtgttttcggggtttatttggttgtagttacgtatttttttttagtggcgtcggaattgtaaagtatttgtgagtttgcggaagttagtttagattttagttcgttttagttcggttcgattcgatcgtattcggcgtttgttttcgttcggcgttttcggttagttatgggtttttggagtcgtagtttttcggcgttgttgttgttgttgtaggtatttcggattttttgatttgcgagggacgtattcgggtcgtaagtttcgcgttttagttttgcgtttttttttttttcgtcgttatcgtttttttttttttaagaaagttcgggttttgaggagcggagcggtttggaagtttcgcgcgtttcggattttttagtgatgggagtggggggtgggtggtgaggggcgagcgcggtttttttgttttttttagcgtagatcgaggcgggggcgtttggtcgcggagttcgcggggtgggttcgcgcgggcggtgggggcgtgaagcggggtgtagggggtggggtgtggagaaggggtgttttggtgtaagtcgagggggagttaggagtcgtggggacgattttcgagggaaggagaggggtattcgtagaaataaaggtatttgttatgttaagaaaggtcgtaaataggagtgagggtttcggggataagaaagtgaggtcggaggaggtgggagcgtttttcgttttgaggagtggtgtattttcggtttaaggaaagtggggtattggagaataaagatatttttaataaaatgagaaaggagattgaaagggaacggtgggttaggttttgagggggtgattcggcggttttttttcgggagtttttgggggttcggcggtcgtaggtttcggggtgggggagggtgacgtcgttgttcgttcgtttcggggttgcgggttggggtttttttttaatttcgacgtcgggagcgagggaggggcggcgttgttggtttcggtgagtaggagggaatttttcgagttattcggttttatttattttttttttattttagg

SEQ ID NO: 126 - DNA, 2976 bp, Artificial Sequence
  chemically treated genomic DNA (Homo sapiens)
tttggggtgggggaaaggtagatggaatcgggtgattcggagggtttttttttgtttatcgaaattaatagcgtcgtttttttttcgttttcggcgtcgggattgggggaggattttagttcgtagtttcgggacgggcgggtagcgacgttatttttttttatttcgaaatttacggtcgtcgagtttttaggaattttcgggagggggtcgtcgagttatttttttaagatttagtttatcgtttttttttagtttttttttttattttattggagatgtttttattttttagtattttattttttttagatcgggaatgtattattttttagagcgaggggcgtttttatttttttcgattttatttttttattttcgggatttttatttttatttacgattttttttggtatggtaggtgtttttatttttacggatgtttttttttttttttcgaagatcgtttttacgatttttggttttttttcgatttgtattagggtattttttttttatattttattttttatatttcgttttacgtttttatcgttcgcgcgagtttatttcgcggatttcgcggttagacgttttcgtttcggtttgcgttggagggggtaggaaagtcgcgttcgttttttattatttattttttatttttattattggggggttcggagcgcgcgaggtttttaggtcgtttcgttttttaggattcgaatttttttggaagaagggaagcggtgacgacgggagaggaaggggcgtagggttggggcgcggagtttgcggttcgaatgcgtttttcgtaagttaggggattcggggtatttgtagtagtagtagtagcgtcgagaggttgcggttttaagggtttatggttggtcggggacgtcgagcgagggtaggcgtcgggtgcggtcgggtcgggtcgggttggagcgggttggagtttgaattgattttcgtaagtttataggtgttttgtagtttcgacgttattgagagggggtgcgtggttgtagttaggtgagtttcggaggtatcgtttttcgtatcgttgattggttgagggtttatttgtcggttatagttaattagtagcgcggatttttttttagggcggagttgacggttcgtttattcggtttcgtatagacgcggtgattttttagtttggagttgttagggtttaggtgggttatgggatttgtacggttttgattttattgggttcgaattttagtttcgtcggtggtttattaagatttgggattagaaagggtttttatatttggttgagtttttttgttttttgggattttttgtttgttcgttttggagatggggttttatttttttatttaagttggagtgtagtggtgcgattatagtttattgtagtttcgaatttttgggtttaagcggttttttggttttagtttttttagtagttgggagtataggtgtatattattacgttaggttaattttttttttttttgtttttttgtagagagataagtcggggcggataggggtagtgggggcgttgtgtttttttgtattgtttagtttggtttcgaatttttgggttgaagcgatttttttgttttggttttttaaagtgttaggattttaggtgtgagttatgagttattgagttagtagtttaattttttgtttgtttgttttgtttgtattttttgagacggagtttcgttttgttttgtttaggttggagtgtagtggtacgatttcggtttattgtaattttcgtttgtcgggtttaagagatttttttgttttagtttattgagtagttgggattataggcgtgtgttattatatcggttaattttgtatttttagtatagacggggttttattatgttggttaggttggtttggaatttttgattttaggtgatttattttttttagttttttgaagtgttggattataggcgtgagttattgtattttgtttcgagcggtttaattttttaaaaaatttttttagagaggggattttattatgttgtcgaggttgattttaaatttttgaatttaggcgatttttttgttttagtttttttattgagtttttattttttaatttagttttttttaattgtagagttttatgggttagtgagttagtaaattgattttttaggttaggattattttttaaagttttagtttttttatttttttaatgggaataatgattagaaatgtttttttatgttgttgtgggatttttatataattaaaatgataaatgttttttgagttataaatgttttgtatagaagtgaggggtaaaaatagtaataatagggttaggtatggtggtttacgtttgtaattttagtattttgggaggtcgaggcgggtagattacgaggttaggagattgagattattttggttaacgtagtgaaatttcgtttttattaaaaatataaaaaattagttaggcgtggtggtgggcgtttgtagttttagttattcgggaggttgaggtaggagaatggtatgaatttgggaggtggagtttgtagtgagtcgagatcgcgttattgtattttagtttgggcgatagagtaagattttgttttaaaaaaaaaaaaaaaaaaaaaatagtaataataggtgttggatattgaagattattgtgttagtttttgtgttaagtatttgatattgattagtttttttttttttgagacggagttttgttttgtcgtttaggttggagtgtaatggtgtgtttttggtttattgtaattttcgttttttgggtttaagcggtttttttttattagttttttgagtagttgggattataggtatgcgttattacgattggttaatttttgtatttttagtagagatagggttttattatgttggttaggttggttttgaatttttgtttttagatgatttatttgttttagtttt

SEQ ID NO: 127 - DNA, 2310 bp, Artificial Sequence
  chemically treated genomic DNA (Homo sapiens)
taaggggtgggatttggatttgaatttaggtggggtcggttttaagggtttatgttaggtttgagagagtaagatttttattttcgtaacgtaagtaatttatggtttagttataggtttggcggggaggaggacggatagattattaggttagttttggaaggttaaagaatttgttatttaaaattttaggttgggtttcgttttttacgtttgtaattttagtattttaggaggttaagggaagcggattatttgaggtcgggagttcgagattagtttggttaatatagcgaaatttcgtttttattaaaaatataaaaattagtttggtgtggtagtgggcgtttgtagttttagttattcgggaggttgaggtaggagagtcgtttgaatttgggaggcggaggttgtagtgagtagagatgacgttatcgtattggacgatagtgagattttattttaaaaaaataaataaaataaaaaaatttttttagtttttagttcgttttttaaatttttaaatttgagttggggacggggagggagaaggattaggaggtggtatttagggttttttaaggtagtagtagaaggtgaaggaggagtgaggggataggtgagagagattgatcgggaaagtttagtttcgtggggaagggtttgtggggtagtgattgagatttaggatcgtttttatggttagagtttatttgtgtgtagtaagaggaaagtatttcgtgtttaacgtagtggaatgagagtaacgtagaagaataacgaattttaggtttggcgtttattttttaggaagggtgtgggagagttgttttttaagggagattttttggaggttgttttgcgtagtaagtagtttttatttagattatatatagtattttagattaattttaaaatttttgcgttttaaaaattgtttttatttatattttatagaaagttgagaaagtgttatttatatggggggtaggggtgttggagattatgagattaataataatttttttagttcgtattttttggtattattatagtttttaaattttgggattttttcgattagtttttttttgtttagttgtgaaatggaagaagcggttcgggtgtggcggtttatgtttgtaatttgagtattttgggaggcggaggatcgtttgagtttagaagtttaagattagtttgggtaatatagggtgattttttatttttttttcgttttattatatcgttataaaaaatttttaaaaattagtcgggtgtggtggcgtaagtttgtagttttagcgggagttgagggaggagaatcgttttagttcgggaggtcgaggttgtagtgagtcgagatcgcgttattgtatttttgggcgatagagcgagattttgtttttaaaaaaaaaaaaaaaagaaaaaagaggaagttgtatttaatttagaaacgcggtttttcgggatttgttagttttatatttcggaggatttttttcggcgggttggtacgggaggtggagaaagaggtttgggcggtttcgttgtagtcgcgtgtgggaggacgtacgggtttgttttaaagttttgggataatagcgttttcgggggataatgaatgcggagttttcgtttttagtcgattttagatgtgtttttattttttttcgttgtagtcgtaaggtaaggaaatattttttttttcgtattgaggaggttgaggagtgtattgggtgttttttttttttttaatttagaattgcgagatagaggttgagtttttgtaaagaatagttttagaaaagttaggagagcgtaggagggtattcgggaggttaggaggggttcgttggggttttaatcgtatttatatcggttttatttgcgagggggcgggatttcgtggcgttggattaattagtatttatttgcgtttatttggttttttttcgttggttttcgggggttgcggtgtttaaaggggtaagagttgagcggaatatcggttcgtcgtcgcggtagttgttttatttttttttttgtagttatggggttttttcgtggatttttcgcgttttttttttttttttaggtattttatagtttcgtcgtggtttcgatcgggatcgttttttggggggcgggcggggttcgtatggggtagtggcgtcggggagagcgcggggttgcgttttttggggttaagggagtttcggaaggttcgtgaggattttgcggtgtggggagtgtagggtcgggtacgtttggatttagttttttttattttttgttttcgggcgtagg

SEQ ID NO: 128 - DNA, 2310 bp, Artificial Sequence
  chemically treated genomic DNA (Homo sapiens)
tttgcgttcgagggtagagagtgaaggaggttgggtttaggcgtgttcggttttgtattttttatatcgtagggtttttacgggtttttcgggatttttttggttttagggagcgtagtttcgcgtttttttcgacgttattgttttatgcggatttcgttcgttttttagggagcggtttcggtcggggttacggcgaggttgtggagtatttggagaaggaggagagacgcgagaggtttacgagggagttttatggttgtagagagaggggtgaagtagttgtcgcgacggcgggtcggtgtttcgtttagtttttgtttttttgagtatcgtagttttcgggagttagcgggaggaggttaggtgagcgtaggtgggtgttgattggtttagcgttacgaggtttcgttttttcgtaggtgggatcgatgtgggtgcggttgaggttttagcgaattttttttggtttttcggatgtttttttgcgtttttttggtttttttggagttgttttttatagggatttagtttttgtttcgtagttttgggttagaggagaaaagaatatttagtgtattttttagtttttttagtacgggaagagaaatgtttttttgttttgcggttatagcggaaaaaagtggagatatatttgaagtcgattgaaaacggaggtttcgtatttattatttttcggaggcgttgttattttaaagttttgaagtaggttcgtgcgtttttttatacgcggttatagcggggtcgtttaagtttttttttttatttttcgtgttagttcgtcggggaggatttttcggggtataaaattagtaggtttcgaaggatcgcgtttttgaattggatataattttttttttttttttttttttttttttttggagatagggtttcgttttgtcgtttaggagtgtagtagcgcgatttcggtttattatagtttcgatttttcgggttgaagcgattttttttttttagttttcgttgagattataggtttgcgttattatattcggttaatttttaaaaattttttgtagcgatgtggtggggcggggggagggtggagggttattttatgttgtttaagttggttttgaatttttggatttaagcgatttttcgttttttagagtgtttaggttataggtatgagtcgttatattcggatcgttttttttattttatagttaaataaagggaagttagtcgagaaagttttagagtttggaagttgtagtggtgttaaagggtgcgagttaagagggttgttattagttttataatttttagtatttttattttttatataaataatatttttttaattttttgtaaaatgtaaataaagataatttttaaaacgtagaggttttgaaattggtttgaaatattgtatataatttgggtaaaaattgtttgttgcgtaaagtagtttttagagagttttttttggaaaatagtttttttatattttttttaggagataaacgttagatttgggattcgttgtttttttacgttatttttattttattacgttagatacgaagtgttttttttttgttgtatataagtgggttttggttatgaaaacggttttgagttttaattattattttataagtttttttttacggagttgagttttttcggttagttttttttatttgtttttttattttttttttattttttgttgttgttttgagaagttttggatgttattttttggttttttttttttttcgtttttagtttagatttaggggtttgaggaacggattggagattggagaggtttttttgttttgtttgtttttttgagatggagttttattgtcgtttagtacggtggcgttatttttgtttattgtaattttcgttttttaggtttaagcgatttttttgttttagtttttcgagtagttgggattataggcgtttattattatattaggttaatttttgtatttttagtagagacgggatttcgttatattggttaggttggtttcgaattttcgattttaagtgattcgttttttttggttttttaaagtgttgggattataggcgtgagaaacggggtttagtttggagttttaaatgatagattttttgattttttagggttaatttggtaatttattcgttttttttttcgttaggtttgtggttaagttatggattgtttgcgttgcgagggtgggggttttgtttttttaggtttagtatgggtttttaaggtcggttttatttgggtttaaatttaggttttatttttta

SEQ ID NO: 129 - DNA, 4233 bp, Artificial Sequence
  chemically treated genomic DNA (Homo sapiens)
  unsure (2320, 2321, 2336, 2351, 2363, 2413, 2723..2726, 3730): unknown base
ttttttttttagtcgaagtattttttgttcgttttttagcgtatgggtggcggttacgtgtttagaacgttcggcgttcgtttcgtttttttagttttcgcgcgtttttttggtagttggttatatggtgagggtgggggtgagggggtttttttagtttgcggtttgtgtttatggtcgggttttttgcgtttagttgtttcggatcgagttcgggtgtatggggtcgtaggaatcggtttcggggtttcgataacgggtcgtttttatagtatttcgggttggcgtgaggtaagtgtagtttttttttaggaatgagaattagtgttcgttttttttatagttttttacgcgttcgtttcgcgagttggttatggaagggtcgtttaagggcgggaagtggggtttttgtggttatgggaaagtataattttagggattgaggtgtaggattttcgatgtaaggtatgtgttatgtgtgatttttgtgcggggcgcgattgttttaaaggaaaaagcgttttttattgtagggttttacgtggttggaggggttggtattgagttattgtgttatttttggggtcggttttaaggaagattgggagcgggggatgggatgttggtggtgttttttgcgttttttttttgggagtttttttgttgttgtaggttatattattttaattttgtaagcgatttttggtgataggagtttgtgattgtagggttttttttgatttgagaatggttatttttcgatatgagttagtggttgaaattggtgtcggtgtttatgggatagtgtataaggttcgtgatttttatagtggttattttgtggtttttaagagtgtgagagtttttaatggaggaggaggtggaggaggtttttttattagtatagttcgtgaggtggttttattgaggcgattggaggtttttgagtattttaatgttgttcggtgagaaggtggtggagggttgggcgtggggagtaaagggaaaagatagtttataggtggggtgtgatgatttgtagagaagtggggattttgaggaaataatgagaggttatgttgggttaaaggggattgaaaagtgagtatttattttggttaggttgatggacgtttgtgttatatttcgaattgatcgggagattaaggtaattttggtgtttgagtatgtagattaggatttaaggatatatttggataaggtatttttattaggtttgttagtcgaaacgattaaggtgagtggggttggtaggtattgagaggtggattgggatttttgtagtagaattttttgggattttaggtatggtgtttagtttttagtgtatttgtatttttttttttgaaattaggatttgatgcgttagtttttaagaggtttagattttttttatgttaattgtatcgtttatcgagatttgaagttagagaatattttggtgataagtggtggaatagttaagttggttgattttggtttggttagaatttatagttattagatggtatttatattcgtggttagtagaaagatggtattaaaatgggttttggttgggaataggagagtgattgttcgtagtaattgagaagttatgtgttttatgtgtttagttaagtaagttgtgttttatggtaatttatggggtttttatttattttttttattttttttaggttgttatattttggtatcgagttttcgaagtttttttgtagtttatatatgtaatatttgtggatatgtggagtgttggttgtatttttgtagagatgtttcgtcgaaagtatgggatttatatattttggattattttgaattttttaaatcgtttgtttataaattatatttatattttgtttattttttttttttgagattagggtttgttgtgttgtttaggttggattgtaatggtatgattatagtttattgtagttttaattttttgggtttaagtgatttttttattttagttttttaattagttgatattataggtacgtatttttatgtttggttagtttgttaatatttttatagagatggggttttagtatattgtttaggttggttttgaatttttgtatttaagtaatttttttatttttattttttaaagtagtataagttattgtatttggttttatttttttatttgcgtattattaatttgtttatagtagaaagttttgaaatgttttggaattaggaattttatatttttttattttttttattttttatttatttatttatttatttatttatttattgagataaggttttattttgnnatttaggttggagtntagtggtttaattanagtttattgtantttttattttttgggttaaagmaatttttttattttagttttttgagtanttgagattaaaggtgtacgttattatgattggttttttttttttttagatggagttttgttttgtcgttaggttggagtgtagtagtgcgatttttgtttattgtaatttttattttttagatttaagtaatttttttgatttagttttttaagtagttgggattataggtgtacgttattatgtttagttaatttttgtatttttagtaatgataggttttattatgttggttaggatggtttcgattttttgattttatgatttatttatattagatttttaaagtgttaggattataggcgtgagtnnnngtatttggtatttttttttttttaaaaaaagagataaggttttgtttgtttaggttgatttagaatttttgggtttaagtagtttttttattttagtattttaaagtgttggaattgttggtttttattttttatattttttattttgagttattaagtagtaattatttaattaagatatttttgaaaatgattgttattttatatttttttttattttaggttttttttttgtggaaattttgaagtcgattagttgggtaaaatttttgagtaagtgattaatatgggagaaaaagattttttattttgagttttttttttgttgaatttaggatggtaattggttttgttatggggatgggaattggaggatttttttgattagagtttttttgttttttatagtttgattgggttgtttttagaggatgattggtttcgagatgtatttttgtttcgtggagtttttttttttagagggtttcgtttagtgtagtcggtggtatttgagatggaggagtcgggagtatagttgttgttggtaattggagatggttgtgggtatagggaaagaaatagagattggggaaagaaatagagtagtatgtagggttttggttattgtggttaatgaaatttggttggtagatggtttgtagtttttattatagttgtaaatagttatttatagagaaggatatagaagagaatttattttggttgggtacggtggtttacgtttgtaattttagtattttgggaggttaaggtgggcgtattatttgaggttaggagttcgagattagtttggttaatatggtgaaatttcgtttttattaaaagtataaaaataagtcgggggtggtggtatacgtttgtaattttagttatttgggaggttgagataggagaattattttaatttaggaggcggaggttgtagtgagttgagattatattattggtattttagtttgggtgatagagcgagatttcgtttntaaaaaaaaaaaaaaagaaaaaagaagaaagtttattttaggtattgttgtgggtggtagaagttgttttttttatggttttttgatttttgtttttttttttaggaaatgttgatttttaatttatataagcgaatttttgtttttcgagttttgtagtatttttatttatataaggatgaaggtaattcggagtgagtaatggagtggttgttatggaaggaagaaaagttgttattttttttttggatattgagagggtaatttttgtttttatttttgaggttatggagggtttttttttatttttttatagagattattttgttgttttaatgatattttttttttatttttttttttgaggttttttttttttttttttatttttttatattaaggggtatgtttttttttgtttttttttttatttttatatttggggtttttttttatataggaaaaataaaattaaaagaaawaatggtttttttttttttttt

SEQ ID NO: 130 - DNA, 4233 bp, Artificial Sequence
  chemically treated genomic DNA (Homo sapiens)
  unsure (504, 1508..1511, 1821, 1871, 1883, 1898, 1913, 1914): unknown base
aaaaaaaaaaaaagggttattwttttttttggttttgttttttttgtataaaaaaggattttaaatataaaggtagggaaagggataagagggaatatattttttagtgtagagaaatgggaaggagaaggagaagttttaaaaggagaggtgggaggggaatgttattaaggtagtaaagtaatttttgtagaaagatggaggaggattttttatagttttagagataaaggtaaagattgtttttttagtgtttagaagggaaatggtagttttttttttttttatggtagttattttattgtttatttcggattatttttatttttatgtagataagagtgttgtagagttcgaaaggtagagattcgtttgtgtgggttaaaagttagtattttttgaggggagaggtaaaggttagaaaattatgaagaaaatagtttttgttatttataataatatttgggatgagttttttttttttttttttttttttttttttgnagacggagtttcgttttattatttaggttggagtgttaatggtatgattttagtttattgtaattttcgttttttgagttgaagtgatttttttattttagttttttaagtagttgagattataggcgtgtgttattattttcggtttatttttgtatttttagtagagacgaggttttattatgttggttaggttggtttcgaatttttgattttaggtgatacgtttattttggttttttaaagtgttgggattataggcgtgagttatcgtgtttagttaggatgggtttttttttatatttttttttgtgggtggttatttgtagttgtaataaaaattatagattatttattaattaagttttattaattatagtggttagggttttgtatattgttttatttttttttttagtttttatttttttttttgtgtttatagttatttttagttattagtagtagttgtgttttcgatttttttattttaggtattatcgattgtattgggcggggttttttggggggaaaggttttacggggtagggatatatttcgaggttagttattttttggaggtagtttaattaggttgtgggggataggagaattttggttaggagggttttttagtttttatttttatggtagagttagttgttattttgggtttagtagaaagaggatttagaatagaaaattttttttttttatgttggttatttatttaaagattttgtttaattggtcggttttagagtttttatagaagagaggtttaaggtgagaagggatataaggtagtagttatttttaaagatattttagttgaatggttattgtttagtggtttaaaataggaagtatagggaataaaggttaataattttagtattttgggatgttgaggtgagaggattgtttgagtttaggagttttagattagtttgggtaagtaagattttgtttttttttttaaaaaaaaagaaatgttaggtgtnnnngtttacgtttgtaattttagtattttgggagtttgatgtgggtggattatgaggttaagagatcgagattattttggttaatatggtgaaatttgttattattaaaagtataaaaattagttgagtatggtggcgtgtatttgtggttttagttatttgggaggttgagttaagagaattgtttgaatttgggaggtggaggttgtagtgagtagagatcgtattattgtattttagtttggcgatagagtaagattttatttaaaaaaaaaaaaagttagttatggtggcgtgtatttttagttttagntatttaaggggttgagatgggaggattkttttagtttaggaggtagaggntatagtgagttntaattgggttattgnattttagtttgggtnntagagtgaaattttattttaataaataaataaataaataaataaataaataaaaaataaagagaataaagggatatgaagtttttaattttagaatattttagagttttttgttatgggtaagttagtagtacgtaagtaaaagaatggggttagatgtagtagtttatgttattttgggaggtaggggtgggaggattgtttgagtgtaagagtttaagattagtttgggtaatatattgagattttatttttataaaaatattaataaattagttaagtatggaggtgcgtgtttgtagtgttagttagttgggaagttgagatgggaggattatttgagtttaggaggttgaagttgtagtgagttgtgattatgttattgtaatttagtttgggtaatatagtaagttttggttttaaaaaaaaagaatgggtaaggtatggatgtggtttatgaataagcgatttggggaatttaaggtagtttagggtatgtgggttttatattttcgacgaaatatttttgtaaagatatagttaatattttatatgtttataggtgttgtatatgtggattgtagaagaatttcgggagttcggtattagagtgtaataatttaaagggaataggaagaatggatggggattttatgggttattatgaaatataatttgtttgattgaatatatgaagtatatgattttttaattgttacgggtaattatttttttatttttaattagaatttattttggtattatttttttattgattacgggtgtaagtgttatttggtagttgtagattttggttaggttaaagttagttagtttgattgttttattatttgttattagaatgttttttggttttagatttcggtgaacgatgtaattggtatgaaggaaatttaggttttttagaaattggcgtattagattttagttttaaagggggaggtatagatgtattggaaattaggtattatatttgaaattttagaaggttttattataaaggttttaatttattttttaatgtttattaattttatttattttgatcgtttcggttggtaagtttggtgggggtgttttgtttagatatgtttttaggttttggtttatatgtttaaatattagggttattttgatttttcggttagttcgggatgtggtatagacgtttattagtttgattagagtaaatgtttattttttaattttttttaatttaatatggttttttattatttttttagggtttttatttttttatagattattatattttatttataggttgttttttttttttattttttacgtttaattttttattatttttttatcggataatattgggatgtttaaaagtttttagtcgttttagtaaagttattttacgaattgtgttgatgggaaggttttttttatttttttttttattggggatttttatatttttgagggttataaagtggttattgtggggattacgggttttgtatattgttttataggtatcgatattaattttagttattggtttatatcgagaggtagttatttttagattaagggagattttataattatagatttttattattaaaagtcgtttatagagttaggatggtatgatttgtagtaataaagggatttttaaaaaaaaagcgtaaagaatattattagtattttatttttcgtttttagttttttttggggtcggttttagagataatataatgatttaatattaatttttttagttacgtgaggttttgtaatagaaaacgtttttttttttgggataatcgcgtttcgtataaagattatatatgatatatgttttgtatcgaagattttatattttagtttttaaaattatatttttttatgattataaaggttttatttttcgtttttgagcgatttttttataattagttcgcgaaacgaacgcgtggaaagttgtgaggggggcgggtattggtttttatttttgggaagggattgtatttattttacgttagttcggggtgttgtgggggcggttcgttatcggggtttcggagtcggtttttacggttttatatattcgagttcggttcggagtagttggacgtagagggttcgattatagatataggtcgtaagttagagaggtttttttatttttatttttattatgtgattagttgttaaagaggcgcgcggaaattgggagggcggggcgaacgtcggacgttttgggtacgtgatcgttatttatgcgttgaggggcggataggaggtgtttcgattgggaggaggg

SEQ ID NO: 131 - DNA, 7369 bp, Artificial Sequence
  chemically treated genomic DNA (Homo sapiens)
tagaagtttttttttagagtgtgtttgggtatatatttaagtgtatggttgtaaatttttttttttaaagtattgaatagtattagatatttagtaggtatttaagaaatattgaatgtcgtggtggtggtgagttagaagttataaaaaaaatttttttttaaaaataataataaaaagaattattttattgtgaagtttagtattataaaaatttaaataatttattataagtttttattaaaaaaaattttttttttaaagtaaatagatagataatgtttagtttatttgaaatgtttgaaagtagaggggttttaaggtagtgggagaaggtgtttgttttttgttggatatttgataattagttttttggatggtttggatgtataggagcgaaggtgtagatagtagtggggtttagagtggggttttgaggttgtgtcgtggtttttttggggtttagttataattttggtttgattttagggcgaggtaggttaagggggtttgttattgtgtttttttatttttatttgggtttttatttttatagtagaggagaaagaagtttgtttttttcgaggttagttgcgttagaggaagaagattgggtatgtttgggtagagatttttagattttgagtagtttgagatgttagtaattgtagttgttttaagtttgggttttgttttttagtgggatttttgtttagatgaataatttattttttgtaattttttaaaagtaaaattgtaaatgttttaggtatagaaaggaggtaaaggtgaagtttaggggaggttaggggtgtgaggtagatgggagcggatagatatattatttatttttgtgtttgttagaagaattagtagatatttttagaattgttttttatttatgttatttttataaattatttgtaaatgagggttatttggtatttttgttattttggagttatagaaataaaggatgataagtagagagtttcgggtaggaggtaaaagttttgtgttttaattatagttatttttttgttgtatgatttgagttaggttattagatttttttgagttttagtttttttagtagtgtatacgggttatgtggggagtatttaggagatagataatttattcgttaaatttttttttttttggttaataaagttgttgtaattatagggattttttttgtttaggtgagtgtagggtgtagggagattggtttaatgtttaatttttttgtttttttggagattaggttgtttttttttggtagtttttttaattttttttttttcggaagtatgtgataattaataattttgtatatttaagtttagtggattttaatttttttatttgtgaaataaacgggattgaaaaattattttggttttaagatgttttgttggggtgtttaggtgttttaggtgtttttgggagaggtgatttagtgagggattagtgggaatagaggtgatattgtggggtttttttggaaattgtagagaggtgtatcgtttttataatttatgaatttttatgtattaatgttatttttttgatttttttagttgtattgggtaaatttttgtttgttagagtgggttagcggtgagttagaaagggggtttattttaatagtgttgtgtttttttggagagtgttaatttattttttaagtaaaaaaagttagatttgtggtttatttcgtggggaaatgtgtttagcgtattaacgtaggcgagggattgggggaggagggaagtgtttttttgtagtacgcgaggtttcgggatcggttggtttgttggaattcggttaggtttagttggttcggcgttgggtagttaggagtttgggtttcggggagggcggtttcgggcggcgcggtgggtcgagcgcgggtttcgtttttttgaggcgggttcgggcggggcggttgtatattagggtcgcgttgagttgcgttagttgaggtgtgagtagttgtcgaagttagttttttgtggagtcggagttgggcgcggattcgtcgaggtatcgaggtatttagaggaggtgagagagcggcggtagataataggggatttcgggtcggcggtttagagtcgagttaagcgtgttcgcgtgtgtttttgcgtgttcgcgaggatgcgtgttcgcgggtgtgtgttgcgtttataggtgtttttgcggtaggtgaatgacgggcgtgggtcggtgcgcgttcggtttgcgtatacggtgtttttaagtgcgcgggtgacgagagtcgggatgtgtcggagatttcggggcggagagcgggattataagtataggaatttttggttacgtttttcgtttttggaaatttagttggggcgagggagggcgtggacgggatcgttttgggagttcgtttttggttgcggttggttttaggttttaggcgtagtttgttcgcggcgtggggatgaagttcgtgtttttggaggggtttaggaagggcgaggaaagcggagtggagtaagttcgtttaggatcggtttcgggtggttttgggatttaatttgcgtcgttttggtttaggttttaggtttaggttttttacgttattgtgtttattatttggttgagcgttgaggttagcgcgggttgttttttggtttttgggaatgtgttaggattcgttttttaaggattagcgaggaggtgatttattgtgataaggagattttagggaacggattgtatgaggttagaatttcgttcgggatggggtatagcgggattttagaagtttttttttttgttttttcgcggttttcgtttttttatcggtatagtgatttatttggttggaatagtttgtttttaaggaagtcgggtattggaggttcgggatatcgcgtcgggttttcgtttcgcggcgcgttgtaggggtcggggagttacggttttgttttgggcgggttttaattagtttgttagtcggggaagggtaagggttttttttattttttttttatcgcggtcgggagaatcgcggtttagtttgttttcgggtcggggcgttggatttcggggcgggagcggagtttacgtttggatgggaggcggggagggtttatgtttttgaggggtggggggtttggggggtacgacgttgtttagggtttttattagttgtttcgggggtttagggtttttcgatttagtttagatttttttttcgaaagttatagggttgagcggagtaggggggcgagtcgttttttggggcgtcgtcgtttggcgcggattatagcgcgtttttttcgttttaaatttttgggggatatttgcgtttttttcgtgaggaaaagtattttggagttgggttaggaatttggggcgtttaggtagttttttttttttttgtttttttttacgtcgcgtttttgggaggatttgcgagcggttttgttttcgttgttttcgtttatttttattttttagggatttgatttatttcgtgttttgggcgtggagataaggtggaggggtcggttttcggcgcgcgcgcgcgtgcgtgtttgcgcgggcgtgtgtgtgtgtgtgtgtgtgtgtgtgtgtgtgtgtgtttgtgttagagacggtataagagcgcgcggttttttaatagcggcgggagtttcggaagtttggtcggtttagcgtgacgtgttcgcggtttttcggtttttttttattttttttttttttattttagggtgacgcgtagtcggagtggaagtagttttggcgggcgagtagcgttttgtaggaaattgatttattattattttttttagcggttcgaggttttgtttacgtattttttatttcgcgcgtgattttttggaggtcggcgttttttttcggttttggcgggaatagtatataggttttttcgcggagtggggttggtcggcgcgaatcgtcgcggttatttttgggtttattcgagattaatttttatgttattattatttttttaaaggagtattttttaggtttaatagtatttattgagtttttattggaaattaaaatatggttgaagtttaaggtaggaaggttaataaaggaggttatttttaattgtttttaaaataagggtttgcgtttttgagttttttttgggttgaaagttattatgagtatgagagtagattttgatgggggaggagaggtttatgagagttataagagaaggaggggtggtagaagaggagagggtgtttgtttagattttagttttgttttgaattttcgagagttagggaatatttagtattttgatgaagttttaggcgggcgttttttttttgtgtttatgatgtattgagatttagaatgtttattttaaatatattagtgtgttttcgtttggttggtaatttaagagtgtttatttgaggaattgtgttaaatatttgtttgaatttttaatttggattaagttggtttcgggaggtagggttttagtaatttatattttgaaaaaattttttaggtgtttttttttttttttttttttttttttttttttttttttttttttttttttttttttttttttttttttttttttttttttttttttttttttttttttttttttttttttttttttttttttttttttttttttttttttttttttttttttttttttttttttttttttttttttttttttttttttttttttcgatagagttgtattttgttatttaggttggagtgtaatggtattattttggatttaagtagtttttttgttttagttttttaagtaatcgggattataggcgtgattttttcgtttttatgtttagatttttttttttttttttttttttttgagatgcggtttcgttttgttatttaggttggagtgtagtggcgtgatttcggtttattgtaagtttcgtttttcgggtttacgttatttttttgttttagtttttcgagtagttgggattataggtgttgttattatgttcggttaatttttttttgtatttttagtagagacggggttttatcgtgttagttaggatggttttaattttttgatttcgtgtttcgtttttttcggttttttaaagtgttgggattataggtgtgagatattgtatttaattatttagttaatttttatttatttttatttttagtagagatagggttttagttagttgtttaggttagttttggatttttgggtttaaatgatttttttatttttgttttttagagtattaggattataggtataagttattgtttttggtttttttaagtgattgtgatgggtttttttggttaagaaattttaaaattagagagggagtggggtttaatattatagtataggatttagggtaaataggtttgggtttagattttggttgtgttatttatgaattgtgtgatgttaggtaagttatttaatttatttgagttttggttgttttttttgtaaaaagggagttaatagatatttattttttaggaggattgatatttttaaattgtttagaatagtttttaaatataaaaatatataaataaattttaatttatgtttagtagagggtggatagaggttatttgagggttttgtttattgtattgggtgatttttttatggggtagtggtttttggtttttttagttgtatgatttaggggtaagttttatattttttttattttttgttttttaaatttggtgtgaagttattaagagtttttttttttaattagttgggacgtgaaattgtgggttttattgattataagtagtggggtgaggtggggtggagtagatgtggtatgtgtttcgggttttttgttttatgaggatttagtagagtttttatttttagaaattgtaagttgggatttgtttttaggaaaatttagttgttgttaaggtcgtgtagttatttagttttggagttaagttagagtaggtaggtaggtgttagggtttttttatgggtaaatttatttttcgtttttttttttttgaagggggaggagaggagttaggtagattagttatttttaattttttttttgtttgtaaaacggtttttttggatataggtaatacgaggtaggggttgttaggtgtttagattttagattatttgatgtgtttggtaggatgtggtttagtttgggagaaattattttttgcgttgtttcgttcggtttttttttatttttaggttattcgtttgacgatatttttgggaaaggtttttagtttatagtatttgttagttgttgtttgaaggaggtagttggtagggggaagtgataggggggaggtttagtaaaattgaaggtagagaggaataattatatttttgtttttaatgtatttttttatacgaagtgttgttggtacgttatttatattaatttagttaatttttatgtttattttttgagatagttattattattatttttattttatagatgaggaaattagagtttagataagttaagttgtttgtttagggttatttagtaaaatttggattttagtttaggtgatttggttttagagtttttttgtttaattattaggatatagttttttatttagttttgttttgtttgttttgttgtatggattttgtgattaattttttgagtatgtgtttgtagttatgttttttaaatttgtatatggttttatttatggatgaggaaattgagatttagagatattaagtggttttttaaagtttacgtagtaattggtagagttaggattataattcgggtgttttttgttttaaagtttcgggtatttttatttggtagagtagggttattttatttggggatttgggtcgggggatttaggaggttggaggaattgttagattgtttttttttttgggaattgattttttggttagggttgcgattaggaaattgttggattttggtaatttatatatatttggggggtatttatatttatgagggatatttttggggggaaaataaattgattttagttgataatatttggtggtaaataggattttggtttttgtttttgtaatagatttgtttttgttgatattagtttgttttttagttgtttgtttttttagtgattttggtgtgttaggttggttgagttttgttggtgggggttaggttttttgtgggaaggaagtaggaagattagttggaaggagtgagagagattttttggtaggaagacgttatttgaggtgatatagtaaagttcggttaggtaatatagtgtttaattttcgtcgtgattagggttttttttgtatttttgttgtagg

SEQ ID NO: 132 - DNA, 7369 bp, Artificial Sequence
  chemically treated genomic DNA (Homo sapiens)
tttgtagtagagatataaggaaggttttggttacggcggagattagatattatgttatttggtcgggttttgttgtgttattttaggtgacgtttttttattagagggttttttttattttttttagttggtttttttgttttttttttataggaggtttgatttttattagtagagtttagttagtttggtatattaaggttattgggagagtaggtaattgaagggtaagttaatgttaataaaggtaagtttattgtaagagtaaggattagggttttgtttgttattaggtattattagttaaaattaatttgttttttttttagaggtgttttttatgggtgtgaatgttttttaaatatgtgtgaattgttagagtttagtagttttttaatcgtagttttggttagaaggttaatttttaaaagaagaaatagtttgatagtttttttagttttttaagtttttcgatttagatttttaagtagggtaattttgttttgttaagtaaaagtattcgggattttggggtaaaaagtattcgggttgtggttttagttttgttagttattacgtaagttttaaaaagttatttaatgtttttaggttttagtttttttatttataaatggggttatgtataagtttaaagagtatggttatagatatatatttaagaaattgattatagagtttatgtagtaaggtagatagaatagagttgaatgaaaggttgtattttggtggttaagtaggagggttttggagttagattatttgggttggagtttaggttttattaggtgattttgggtaagtaatttaatttgtttgagttttagtttttttatttataaaatggggatagtaatagtgattgttttagaggatagatatgagaattaattgagttaatgtaggtaacgtgttagtagtatttcgtatagagaagtgtattgaaaatagaagtatgattatttttttttgtttttagttttattgagttttttttttattatttttttttgttaattattttttttagatagtagttgataggtgttgtaggttgagggttttttttaaggatgtcgttaggcgggtggtttaggggtaaggaggggtcgggcggggtagcgtaagggatgattttttttaggttgagttatattttgttaggtatattaggtgatttgaagtttagatatttggtagtttttgtttcgtgttgtttgtgtttaaggaaatcgttttgtaggtaaaaagaaaattaaaggtggttggtttatttggttttttttttttttttttaggagagggaaaacggagagtgagtttgtttatgagggagttttggtatttatttgtttgttttggtttgattttagggttgagtgattgtacgattttggtagtaattggatttttttagggataagttttaatttgtagtttttgggggtgaaagttttgttgagtttttatgaggtaggaagttcgggatatatgttatatttgttttattttattttattttattgtttgtgattagtggagtttatagttttacgttttagttggttgggagaggaggtttttggtaattttatattaagtttaaagggtaggagatggaagagatatgagatttgtttttgagttatatagttaaaaaggttaaaggttattgttttataaaggggttatttagtatagtggatagagtttttaaataatttttatttattttttgttaggtatgagttgggatttatttatatatttttatgtttgggggttgttttaagtagtttaaaaatattaatttttttaaaaagtggatatttattagttttttttttatagaagaggtaattaaggtttagataagttaagtaatttgtttaatattatatagtttataagtggtatagttaggatttgaatttaggtttgtttgttttgagttttgtgttgtagtattgaattttattttttttttaattttgaggttttttaattagagaggtttattataattatttggggaggttaggggtagtggtttatgtttgtaattttaatattttgggaggtagaggtgggagaattatttgagtttaagggtttaagattagtttgggtaattagttgagattttgtttttattaaaaataaaaataaataaaaattagttgggtggttgggtgtagtgttttatatttgtaattttagtattttgggaggtcgaggagggcggagtacgaggttaggagattgagattattttggttaatacggtgaaatttcgtttttattaaaaatataaaaaaaaattagtcgggtatgatggtagtatttgtagttttagttattcgggaggttgaggtaggagaatggcgtgaattcgggaggcggagtttgtagtgagtcgagattacgttattgtattttagtttgggtgatagagcgagatcgtattttaaaaaaaaaaaaaaaaaaaaaaaaatttgggtatgggggcggggggattacgtttgtggtttcggttatttgggaggttgaaataggaggattatttgagtttaggatggtgttattgtattttagtttgggtgatagagtgtaattttgtcgaaagaaaagaaagaaagagagaaagagaaagaaagagagaaagagaaaggaagaaagaaagaaagaaagaaagaaagaaagaaagaaagaaagaaaagaaagaaaaagaaagaaagaaagaaaaagaaagaaagaaagaaagaaagaaagaaagaaagaaagaaagaaagaaagaaaaaaagaaagaaagaaaagtatttagggagtttttttaaaatatagattgttgaggttttgtttttcgagattaatttaatttagattgaagatttaagtaagtgtttggtataattttttagatgggtatttttgggttgttagttaagcggagatatattggtatgtttgaaatggatattttgggttttaatatattataggtataaggaggaggcgttcgtttagggttttattaaggtgttggatattttttggttttcgggagtttaagataggattaggatttaggtaggtattttttttttttttattattttttttttttttatggtttttataggtttttttttttttattaaaatttgtttttatgtttataataatttttagtttaaagaaaatttagaaacgtaaatttttgttttagaaataattaaaaatagttttttttattggtttttttgttttagattttagttatattttaatttttagtaagagtttagtgaatattgttgaatttaaggagtgtttttttgaaggggtggtaatggtataggggttgatttcggatgagtttaggagtagtcgcggcggttcgcgtcggttagttttatttcgcgggaaagtttgtgtgttattttcgttagggtcgggagggggcgtcggtttttaggaaattacgcgcggagtgggaggtgcgtgggtagagtttcggatcgttggagggagtagtgatgagttagttttttgtaaggcgttgttcgttcgttaaaattgtttttatttcggttgcgcgttattttggggtggggagggggagaatgggaggggatcggggggtcgcgaatacgttacgttgagtcggttaggttttcgaaattttcgtcgttgttgggaaatcgcgcgtttttgtgtcgtttttgatatagatatatatatatatatatatatatatatatatatatacgttcgcgtagatacgtacgcgcgcgcgcgtcgggagtcggtttttttattttatttttacgtttaaagtacgggatgagttagatttttggaaaataaaaatagacgggagtaacgaaaataaaatcgttcgtaagtttttttagaaacgcgacgtggagggaggtaaggagaggggaagttgtttgggcgttttaagtttttaatttagttttaagatgtttttttttacgaagagggcgtaagtgttttttaggggtttgggacggagaggacgcgttgtggttcgcgttaggcggcggcgttttagggggcgattcgtttttttgtttcgtttagttttgtagttttcggagagggaatttgggttaggtcgggaagttttgagttttcgaggtagttgatagaggttttgagtagcgtcgtgttttttagattttttattttttaaagatatgaatttttttcgttttttatttaggcgtgggtttcgttttcgtttcggagtttagcgtttcgattcgaggataggttgggtcgcgattttttcggtcgcggtgggaaagaggtagaggagatttttgttttttttcgattgataggttggttagagttcgtttagagtagggtcgtgatttttcgatttttatagcgcgtcgcggagcggggattcgacgcggtgtttcggatttttagtgttcggtttttttgggaataaattgttttagttaaataggttattgtgtcgatgggaggacggagatcgcgaaggggtaggggagagggtttttggagtttcgttgtattttatttcgggcggggttttgattttatatagttcgttttttggggtttttttgttatagtgagttattttttcgttagtttttaggggacgggttttggtatatttttaagggttaggaaatagttcgcgttgattttagcgtttagttaggtggtggatatagtggcgtaaaggatttgaatttgggatttgggttagggcggcgtagattggattttagagttattcgggatcgattttagacgaatttattttatttcgtttttttcgttttttttgggtttttttagggatacggattttatttttacgtcgcgagtaaattgcgtttggggtttggagttaatcgtagttaaaggcgagtttttagaacggtttcgtttacgttttttttcgttttagttgggtttttaggggcggggagcgtgattagggatttttgtatttgtaatttcgtttttcgtttcggggttttcggtatatttcgattttcgttattcgcgtatttagagatatcgtgtgcgtaagtcgagcgcgtatcgatttacgttcgttatttatttgtcgtagaaatatttgtgaacgtagtatatattcgcgaatacgtattttcgcggatacgtagggatatacgcgggtacgtttggttcggttttgggtcgtcggttcggggttttttgttgtttgtcgtcgtttttttattttttttgagtgtttcggtgtttcggcgaattcgcgtttagtttcggttttataaggaattgatttcggtagttgtttatattttagttggcgtagtttagcgcggttttgatatataatcgtttcgttcgggttcgttttaaggaggcgggattcgcgttcggtttatcgcgtcgttcgggatcgtttttttcggggtttaggtttttggttgtttagcgtcgagttagttgagtttggtcgagttttagtaggttagtcggtttcggaatttcgcgtgttgtaggagggtatttttttttttttttagtttttcgtttgcgttggtgcgttggatatatttttttacgaagtgagttataaatttggttttttttatttggagaatgagttggtattttttaggaggatatagtattgttagaatgagttttttttttggtttatcgttgatttattttggtaggtaaggatttatttaatgtagttgaaaagattaggaggatgatattaatatataaaaatttataaattataaaaacgatgtatttttttgtaatttttagaaaagttttataatattatttttatttttattgattttttattaggttattttttttagaagtatttggagtatttagatattttaataaagtattttgaggttagaatgattttttagtttcgtttattttatagatgaggaaattgaggtttattgaatttaagtatataaagttgttgattgttatatgttttcgggaaggagggaattggagagattattaaaaaagggtaatttgatttttagggaaatagaagaattggatattgaattaatttttttatattttatatttatttgaatagaagaaatttttgtggttgtagtagttttgttggttaggaaggggaggatttgacgagtgagttgtttgttttttgaatattttttatatagttcgtatatattgttggggaaattggggtttagagaagtttggtgatttaatttagattatgtagtaaagaaatgattatagttggaatataggatttttgttttttgttcggggttttttgtttgttattttttatttttgtggttttaaaatgataaaaatgttaaataatttttatttgtagatggtttatggagatgatataaataaaggataattttggaagtgtttattggtttttttgatagatatagaaatgagtgatgtgtttattcgtttttatttattttatatttttgattttttttggattttatttttgttttttttttgtgtttgaaatatttgtagttttgtttttaaaaaattgtagaggatggattgtttatttgaatagaaattttattaaaaaatagaatttaggtttggagtagttataattattgatattttaggttgtttagagtttggaaatttttgtttagatatgtttagttttttttttttaacgtagttgatttcggggaggataggttttttttttttttgttgtggggatgggagtttaggtaggggtgggaggatatagtagtagatttttttggtttgtttcgttttggagttaggttaggattgtggttaaattttagaaaggttacggtatagttttaggattttattttaagttttattgttgtttgtattttcgtttttatatatttaaattatttaaagggttggttgttaaatgtttagtagaggataggtatttttttttattgttttgaagtttttttgtttttaggtattttaaatagattagatattgtttgtttgtttattttggggagaaaattttttttaataaaggtttgtaatgaattatttaaatttttgtggtattgagttttataatgaaataattttttttgttgttgtttttgggaaagaattttttttataatttttagtttattattattacgatatttaatattttttaagtatttattaagtgtttagtattatttagtgttttaaaaaaaaaagtttgtaattatgtatttgaatgtgtatttagatatattttaagggaggatttttg

SEQ ID NO: 133 - DNA, 3486 bp, Artificial Sequence
  chemically treated genomic DNA (Homo sapiens)
aattaaagaggatgagattttttgtttgattttaggtgaatttttttttgttagttaggtaggaagttttgatttgaaaattagttttgggtattgttttttttattgttttttgggtattaatttttgttttttaattttagttgaattagtggatggtgatattataggtttaagatagttgtatttaaatattagtgattataggttatattaaggaaatatttgtaggtaatttagggtttgggaaggagttatttttagttatttgtaagatagtaggatttgtagattatagtataattaaatttagataaaattttgaattagtgagaattattaggaaggaaaggaatagaaaatgaattaatttgagtgttaggagatttgtatttagttttgatttcggtattaatcgaatgtatgtttttggataggaaatttttttgagtttcgatttttttcgtggtaaaaaggagagggttaaattatagggtttcgagggttttttttagttgttatattttggagcgtatgagatgaggtaggtatataaagtggataagatgtggttaagaaaataagttatatattaagtttatttgtagtataggtgtttaagaaaattttgttgttgtgtaatattagaacggaaggttggtttttagtaaaatgtattaattttggtttaaattaagatgatgggtatcgggtatgggggtggggaggtagttgaagatttattgagttttgttttagggtagttttgtttatcgttttattttattttttattacggtgtttaagtttatattgagagagaaatttttagttgtaaaagggagaagagaaacgttggaatattagtatcggacgttaggatatggttgtggtgttttaaaaattattttattatttggagtttgatttcgaggggagtatttttattttttagttttttgaaagtatttattagtatttgaatattgttttgagtttgttggagtagtgaaatttggtgagagagaagggtggaggaaggaaggagttgttgtatttggcggttggatttaggtagaggaaattgttataatttcgggaaagaatagaaaagtagaaagggacgagtttttatacgtagttaatgtttatggttttaattgtgtttgggaaggaagattttgggttaggggtgtattttcgttttttaaaattaaacgtgtttgagatagttataaagtttattaagggatttgagagattagagttttttgttttttttttttaattttgagttttttttttatttttattgagggagagtttgagtttatgataagtgtcgcgtttatttttggttaatttttaaaagaaagacgttcgttttggttttttttttaggtttttagtttttttagggatggtagaaatttttgggttaaggttgagcgaattattgtttattgtttttattagtttttagtaaaggtacgtcggcgggggggcgtttagtttttttagtaaacgtttcgcggtttttttcgtagattacgaggtgggggtcgttggggagggtcgagttgggggtagttcgttatttcggtttttagcgagttgtcggcgattttcgcggttttttggtttaggtttcggtttttcgggcgaggagcgggagggaggtcggggtttaggcgtcgcggcgaattcgttaacgtagcgtcgggtttcgaattttaggtttcgttttaggttttcggtcgtttggttagtttgtttgttttaattttaattttttcgaggttagttagagtaggtttgttggtagtagtatttttttagtagttacgcgattagttaatttttcggcggcgttcggggaggcggcgcgttcgggaacgaggggaggtggcggaatcgcgtcggggttattttaaggtcgcgttcgttagtttcggcggggcggttttcgtcgtcgtaattaatggatttttttttttgtttaaatagattcgtcgtgttaattattttttttttcgttagttttttttttatcgttatattgggttattaaaaaaagggggttcgttttttcggggtgttttttttttttttttttgttttcgtttgtttacggttttgcgatttcgacgtcggtaaggtttggagagcggttgggttcgcgggattcgcgggtttgtattcgtttagattcggacgggttttgttatttttttcgtttgtttggttttttttttttttcgttttttcgttcgttagtttatttgattagcggagattcggcggtcgggtcggggttttttcgtagtttttgcgcgtttttagagttcgggtcgtggttcgtcggggtttgtgttttttggtttcgagggtagtcgttgggttttcgagaggggttcgggttgcgtaggggcgttttgttttgttcggttttgtttttttgagagtgcgagagaggcggtcgtgtagattcgggagaaagatgttaaacgtgcgagtgtttaacgggagttttagtttggagcggatggacgttaggtaggcggagtattttaagttttcggtttgtaggaattttttcggttcggtggattacgaagagttaattcgggatttggagaagtattgtagagatatggaagaggcgagttagcgtaagtggaatttcgatttttagaattataaatttttagagggtaagtacgagtggtaagaggtggagaagggtagtttgttcgagttttattatagattttcgcggttttttaaaggtgtttgtaaggtgtcggcgtaggagagttaggatgttagcgggagtcgttcggcggcgtttttaattggggtttcggttaattttgaggatacgtatttggtggatttaaagattgattcgtcggatagttagacggggttagcggagtaatgcgtaggaataaggaagcgatttgtaatcgacggtaatgatttttttttaattatagaatgtgtttggggtttcgttttgtttgttggagggtgttaattttagtttgtttttcggcgtattttgatttagttttgggagagttaattttattggttttaggtgtttagtgttatttggtttattgtttgtttgtttgtgatttttaagttagaaattggagatggtaagattcgataatttttttaatttaatatatcgcggttttttttattagtaatttttaggtatgtgataaagttgggatgtttattaacggttcgttttttggttagggaaagagttttggggcggagaatgtattttttgttttttgaaaataattttattttgtgtttttaaaagttattggggatgacggatttaggattgtgggtggaggtagtgggttttttattttttgattatggggttaatttttgttagttattgttttttttaataaagattgtgtgttttttttaaaaattttttttgcgtttaga

SEQ ID NO: 134 - DNA, 3486 bp, Artificial Sequence
  chemically treated genomic DNA (Homo sapiens)
tttaagcgtaggggaaatttttaaaaagaatatataatttttattagaaaaaataatggttggtagaagttggttttatagttaggggatgaaaaatttattatttttatttataattttggattcgttatttttagtggtttttaagggtataaaatgaggttgtttttaaaaaatagaaagtgtatttttcgttttagagttttttttttagttaggaggcggatcgttgataaatattttaattttgttatatatttaggagttgttagtgagagggatcgcgatgtattaagttagggaaattatcggattttattatttttagtttttgatttaaaagttataaatagataagtagtgggttaggtagtattgaatatttaagattaataaagttagtttttttaaagttaaattagaatacgtcgaaaagtaagttaaggttaatattttttagtaggtaaagcggggttttaaatatattttatggttgggaaagggttattatcgtcggttgtaggtcgtttttttatttttgcgtattgtttcgttaatttcgtttggttgttcgacggattagtttttgggtttattaaatgcgtgtttttagagttagtcggagttttaattaaaggcgtcgtcgggcggttttcgttgatattttggtttttttgcgtcggtattttgtaggtatttttggggggtcgcgggggtttgtagtagaattcgggtaagttgtttttttttattttttgttattcgtatttgttttttaggggtttgtgattttgaaaatcgaaattttatttgcgttggttcgttttttttatgtttttgtagtgtttttttaagtttcgggttaatttttcgtggtttatcgggtcgaagaggtttttgtaggtcgagggtttggggtgtttcgtttgtttggcgtttattcgttttaggttagggttttcgttagatattcgtacgtttgatatttttttttcgggtttgtacgatcgtttttttcgtatttttaaaaaaataaaatcgaataaaataaagcgtttttacgtagttcgaatttttttcggaagtttagcgattgttttcggagttaaaagatatagatttcgacgagttacggttcgagttttaggagcgcgtaggggttgcggggaagtttcggttcggtcgtcgagttttcgttgattaaatggattggcgagcgggagggcggagaggagaggggattaggtaagcggagagggtggtaaagttcgttcgagtttgggcgggtgtaagttcgcgggtttcgcgaatttagtcgttttttaaattttgtcggcgtcggagtcgtagagtcgtgagtaagcggggataggggagggggagaaaaatatttcgaaaagacgagttttttttttttagtggtttaatatggcggtggaagggaggttgacgaagaagaaaatgattgatacggcgagtttatttaaatagaggaggagatttattggttgcggcggcgggagtcgtttcgtcgaggttggcgagcgcggttttaaggtggtttcggcgcggtttcgttattttttttcgttttcgagcgcgtcgttttttcgagcgtcgtcgggagattggttggtcgcgtgattgttggaggggtattgttgttaataaatttgttttggttggtttcggagaaattaaaattaagataaataaattagttaaacggtcgggaatttggggcggggtttgaggttcggggttcggcgttgcgttggcgggttcgtcgcggcgtttaagtttcgatttttttttcgtttttcgttcgggaagtcgggatttggattagaggatcgcgaaggtcgtcggtagttcgttaggagtcggggtggcgagttgtttttagttcggttttttttagcggtttttatttcgtggtttgcgggggaggtcgcggagcgtttgttgggggggttgggcgttttttcgtcggcgtgtttttgttgggggttggtggaggtagtgggtaatggttcgtttagttttaatttagaagtttttgttatttttggggaggttgggggtttagggaagaagttaaagcgaacgttttttttttagaaattagttaggagtagacgcggtatttattatgaatttaagtttttttttaatgaaaataagaaaggaatttaagattaaaaaaaaaaaataaaaaattttagttttttaagttttttaataaattttgtagttgttttagatacgtttagttttgaaaaacgagggtatatttttggtttaggatttttttttttaagtatagttaaggttatggatattggttgcgtgtgggaattcgtttttttttatttttttgttttttttcgggattgtagtagttttttttatttgagtttagtcgttaaatataatagtttttttttttttttattttttttttttattagattttattgttttaataaatttagaataatatttagatgttagtgaatgtttttagagggttgaagggtgaaaatatttttttcggggttaaattttagatgatgaaatgatttttaaaatattataattatgttttaacgttcgatattagtattttagcgtttttttttttttttttgtagttggaaattttttttttagtgtgggtttgagtatcgtggtggaaggtaaagtaggacgatgagtagggttgttttgagataaagtttagtggatttttaattgtttttttatttttatgttcggtatttattattttggtttgagttaaagttaatgtattttattggaaattaatttttcgttttaatattatatagtagtaaagtttttttaagtatttatgttatagatgagtttgatgtgtagtttgtttttttagttatattttgtttattttgtgtgtttattttattttatacgttttagaatgtgatagttggaagggattttcgggattttgtggtttaatttttttttttttattacggaggaaatcgagatttagagaggttttttgtttagggatatgtattcggttggtatcggagttaggattagatgtaagttttttaatatttaggttggtttattttttgttttttttttttttaatggtttttattggtttagggttttgtttgagtttgattgtgttgtagtttgtaggttttgttgttttataagtgattgaaaatggtttttttttaggttttgggttgtttgtagatgtttttttgatgtggtttgtggttattgatatttaaatgtagttgttttgagtttgtggtattattatttattagtttaattaaaattgaaggataggggttgatatttagagaatagtaaagggggtagtgtttagaattagtttttaagttaggattttttatttaattgatagaaaagaatttatttaggattaagtaagaggttttattttttttagtt

SEQ ID NO: 135 - DNA, 2401 bp, Artificial Sequence
  chemically treated genomic DNA (Homo sapiens)
ttattaaagaaaaaaaagatgatttattagatagttgttaaggtatttatataaaattatacgatagtaggatagatggtaattaagagggaatttaggattcgttattattagttggaaatatttgatttttagtttgtaaatgtgataagttagattaatattagtaggatattgaatatagtttgtagggatgagtttttgcgttatttttggatatgtgtttaagtaattagaataatttaaaatgttattaggtttttgttgttatttttataaatttcgaatagtgagttgggtttttaaggaatttgtttttgttagtttattttatgttgtataataaataggtttaaagtttttggtagcgtatattaagtatggaggattttttatttattacgatagttttttcgttggagggttggggttgtattttatttttttttttggaaggggcggtttttgtttgaggttttatttgttttatagtagagggatgaaacggtaggattttggttttgacgggttttatttggtaatggtatatgttaagtgggttacgttttattgtttagagtaagttatatggttacgtttgatattgacgtgcgggaaatgtagaatttttttgtatttggggaggtagatatttggataatatgtaatttattatagggttagttggatgaagaacggttaagggtttaggttttttatttcgagttaggtcgaattagtcggggtcgtgagattaagttacggttattagtgttcgtttggaattatgttttgtttttgtcgtgtttatattgtagtagggtttttgttttttaatttatttgaaattggtggtgggtgtggtatatagatgagaaataggaattttttacgttgggttttaataggagttgcggtgggaatataaatggtgtagttattttggaagatagtttggtggttttttataaaattaaatgtattttttatatatgattcgttatatattatttagtaattgtattttttggtatttgtttagatgagttaaaaatttgtatttatataaaaatttgtacgtggatgttgatagtagttttatttataattgtttaaatttggaagtttttaggaggtgagtgggtaaataaattgtggtgttttcggttagcggaatattatttagtgttaaaaagaaatgagtttaagttatggaaagatatgaaagaattttaagtattattaagttaaagaagttaatttgaaaaggttgatgttgtatgagtttatatttatgatattatagaaaaggtaaaattataaagatagtaaaaggattagtggttgtaggagttagggaggagggagggatgaataggtggggtatagaggatttttagggtagtgaaattattttgtatgatattgtaatggtggatataggatagtaagtatttgttttttatttcgtagaatgtacggtattgagaacggatttttttgtaatatatggatttttagttataatattgaatttttttcggggtttcgtatcgttcgtagcgttttttaattttcgttttcgtttcgtttatcgttttttttttttgttatagcgcgttcgtttcgcggtcgttaattagtcgcgcgtttcggtcgcgcgtttcgtttcgttttcggtgggtgtgcgcgcggttaatgggcggtgcgcgggggtcgggtcgcggcggggcggggtagcggggcggtcgttaatcgtcgtggtgttgttgaaattgaaaatattatattatgttaatcgcggtcgggttcgcgcgtacgggggtggggttcgcgcgtataaagggggcgtaggcgggttgggcgttttataggttaagtgcgttgtgttcgaggggtgtcggttaggtttgagcgagcgagttagttagtaggtatcgagggggcgcggttgtcgttcggacgagataggcgaattcgacgtagaagagtttattatcggatagttaggtagtcgtcgcgtttttcgtatacgtagagtcgggcggcgcggggttttttttgcgttcggttttcgttttttttttttttttttttttttttttttcgttgtttttttttttttcgttgttcgcgtttgcgtagtttcgggttatgttcgacgcgttttttcgtagtatatttacgatggagcgttttgtcgttcgtgggatttttttagtattagtgcgtattagcgtttgtcgtagttttttcgggtcggtggattacgaggagttgagtcgcgagttgtaggttcgtttggtcgagttgaacgtcgaggattagaatcgttgggattacgatttttagtaggatatgtcgttgcggggttttggacgtttgtagtggatcgaagtgg

SEQ ID NO: 136 - DNA, 2401 bp, Artificial Sequence
  chemically treated genomic DNA (Homo sapiens)
ttatttcggtttattgtaggcgtttagggtttcgtagcggtatgttttgttggaagtcgtaattttagcggttttggttttcggcgtttagttcggttaggcgggtttgtagttcgcggtttagtttttcgtggtttatcggttcgaagaggttgcggtaggcgttggtgcgtattagtattgggaaggttttacgggcgataagacgttttatcgtggatgtgttgcggagggacgcgtcggatatggttcggggttgcgtaaacgcgggtagcgagagaggagaggatagcgagaagaaggggaaaggagaggaggagagggcggaggtcgggcgtaagggagatttcgcgtcgttcgattttgcgtgtgcgagggacgcggcggttatttggttgttcggtggtggatttttttgcgtcgggttcgtttgtttcgttcggacggtagtcgcgttttttcgatgtttgttggttagttcgttcgtttaggtttggtcggtatttttcgagtatagcgtatttggtttgtggaacgtttagttcgtttgcgttttttttatacgcgcgggttttattttcgtgcgcgcgggttcggtcgcgattagtataatgtagtatttttagttttaataatattacggcgattggcggtcgtttcgttgtttcgtttcgtcgcggttcggttttcgcgtatcgtttattggtcgcgcgtatatttatcgggggcggggcggggcgcgcggtcggggcgcgcggttgattggcggtcgcggggcgagcgcgttgtagtaggggaagggggcggtgagcggggcgggggcgggagttaaagggcgttgcgggcggtacggaatttcgaaagggatttaatattataattgaaagtttatatgttataggagggttcgtttttagtgtcgtatattttacgggataaaggataaatgtttattgttttgtgtttattattatagtattatataaggtagttttattgttttaaaaattttttgtgttttatttatttattttttttttttttttagtttttgtaattattgatttttttattgtttttgtagttttgttttttttataatgttatagatgtgaatttatatagtattagtttttttagattggtttttttgatttaataatatttaaggtttttttatgtttttttatgatttgagtttatttttttttagtattgaataatatttcgttgatcggaggtattatagtttgtttatttatttattttttgaaggtttttaggtttgggtaattatgaataaagttgttattaatatttacgtgtaagtttttgtgtggatgtaagtttttgatttatttgggtaaatattaaggggtataattgttggatggtgtgtggcggattatatgtgaagggtatatttagttttgtaaggagttattaaattattttttaaagtggttgtattatttgtgtttttatcgtagtttttgttaaagtttagcgtggagagtttttgttttttatttgtgtattatatttattattaattttagatgaattaaaaaatagaaattttattataatgtggatacggtaaggataaggtataattttaaacgaatattgatgatcgtggtttgattttacggtttcggttggttcggtttggttcggggtgaagagtttgggtttttggtcgttttttatttagttggttttgtaatgaattgtatgttgtttaaatatttgtttttttaaatgtaggaagattttgtatttttcgtacgttaatattagacgtggttatgtaatttgttttgggtagtgaaacgtgatttatttggtatgtattattgttaaatggagttcgttaaagttagggttttgtcgttttatttttttgttgtgagataaatgagattttagataggggtcgttttttttaaaagagaaaatggagtataattttagttttttagcgaagggattgtcgtggtgagtgagagattttttatgtttgatgtacgttgttaagagttttgggtttgtttgttatgtagtataaggtaagttgatagagataggttttttgaagatttaatttattgttcgaggtttatgggaatgatagtaagggtttggtggtattttgagttgttttggttatttggatatatgtttagaaatgacgtagagatttatttttgtaagttgtgtttagtgttttgttggtgttggtttagtttgttatatttgtaggttggaggttaggtgtttttagttggtagtgacgggttttgagtttttttttggttattatttattttgttatcgtgtagttttatgtgagtgttttaataattgtttagtaagttattttttttttttttgatga

SEQ ID NO: 137 - DNA, 5660 bp, Artificial Sequence
  chemically treated genomic DNA (Homo sapiens)
aattagaatttttatttttttgcgtttgttatattttttagtgttgtttaatttttttttgtaagtgagggtggtggagggtgtttataatttttttagggagtaagttttttttggttttttttttttttttttttttttttttttttgagattaagtttcgtttttgttttttaggttggagtgtaatggcgcgatttcggtttattgtaattttcgtttttttttgggtttaagcgatttttttatattagttttcgagtagttgggattataggtatgcgttattaagtttcgttaattttgtattttttagtagagatagggtttcgttatgttggttaggtttgtttcgaatttttggttttaggtgattcgtttgtttcggttttttagaatgttgggattatagacgtgagttatcgtattcggattttttttttatgtaatagtgataattttatttaaagtatttttttttttttttttgagtcggagttttattttgttatttaggttggagggtggtggcgcgatttcggtttattgtaatttttgtttttcgggtttaagcgatttttttgttttagttttttgagtagttggaattatatacgtgcgttattatggttagttaatttttgtatttttagtagagacggggtgttattattttggttaagttggtttcgaatttttgattttaggtgatttgttcgtttcggttttttaaagtgttgggattataggtgtgagttatcgcgttttgttttaaagtattttttttttatgttttaaaataagattgtaagttagtttttaaagcggataatttaagagttaataggtattagtttaggatgtgtggtattgtttttaaggtttatatgtattaatatattatttaaatttataataatttttataaagtagggggtatttatatttttttttttttttataattacgaaaaatgtaaggtatttttagtaggaaagagaaatgtgagaagtgtgaaggagataggatagtatttgaagttggtttttggattattgtgtaattttgtttttagaatattgagtattttttttggtttaggaattatgattttgagaatggagttcgtttttttaatgattttttttttatttttttatttgtttataggtagaattttttttcgttcgtattaaataaattttatttttttagagtttgtttttatattaggtaatgtatacgtttgagaaatttttgttttagatagtcgttttatacgtaggaggggaaggggaggggaaggagagagtagttcgattttttaaaaggaattttttgaattagggtttttgatttagtgaatttcgcgtttttgaaaattaagggttgagggggtagggggatattttttagtcgtataggtgatttcgattttcggtggggtttttataattaggaaagaatagttttgtttttttttatgattaaaagaagaagttatattttttttatgatattaaatatttcgatttaatttggtagttaggaaggttgtatcgcggaggaaggaaacggggcgggggcggatttttttttaatagagtgaacgtatttaaatacgtttttgttggtaggcgggggagcgcggttgggagtagggaggtcggagggcggtgtggggggtaggtggggaggagtttagttttttttttttgttaacgttggttttggcgagggttgttttcggttggtgttttcgggggagatttaatttggggcgattttaggggtgttatattcgttaagtgttcggagttaatagtatttttttcgagtattcgtttacggcgtttttttgtttggaaagatatcgcggtttttttagaggatttgagggatagggtcggagggggttttttcgttagtatcggaggaagaaagaggaggggttggttggttattagagggtggggcggatcgcgtgcgttcggcggttgcggagagggggagagtaggtagcgggcggcggggagtagtatggagtcggcggcggggagtagtatggagttttcggttgattggttggttacggtcgcggttcggggtcgggtagaggaggtgcgggcgttgttggaggcgggggcgttgtttaacgtatcgaatagttacggtcggaggtcgatttaggtgggtagagggtttgtagcgggagtaggggatggcgggcgattttggaggacgaagtttgtaggggaattggaattaggtagcgtttcgatttttcggaaaaaggggaggttttttggggagtttttagaaggggtttgtaattatagatttttttttggcgacgttttgggggtttgggaagttaaggaagaggaatgaggagttacgcgcgtatagatttttcgaatgttgagaagatttgaaggggggaatatatttgtattagatggaagtatgttttttattagatataaaatttacgaacgtttgggataaaaagggagttttaaagaaatgtaagatgtgttgggattatttagtttttaatttatagatatttggatggagtttattttttttattaggagggattattagtggaaatttgtggtgtatgttggaataaatatcgaatataaattttgatcgaaattatttagaagcggtcgggcgcggtgttttacgttttgtaatttttttattttgggagattaaggcggggggaattatttgaggtcgggagttcgagattagtttggttaataggtgaaatttcgtttttattaaaaatataaaaagtagtcgggggtggtggtaggcgtttgtaattttagttattcgggaggttgaggtaggagaatcgtttgaattcgggaggttgaggttgtagtgaatagcgagatggagttattttattttagtttgggtgatagagtgagattttgtcgaaagaaagaaagagagaaagagagagagaaaaattatttagaagtaattatatattgtgtttatttttaattgagtagggtaaataaatatatgtttgttgtaggaatttaggaaataatgagttatatttatgtgattattttagaggtaatatgtagttattattttgggaatatttgttaatatttttgtttttttattatttttagtttatttgatatagtttatttgtgataagagtttttaattttttatttttgaatagaggtgttttttttttttttatttttgttttgtgagggagttaggggaggatttaaaagtaattaatatatgggtaatttagtatttttaaaattttgttaatagtttgaattcgggagtttggttttgtagttttataatattttagaagagattttatttgtttaaaaataaaaaggaaaaagaaaagtggatagttttgataatttttaatggagacgggagaagaatatgtagaaaaggggaaatgatgttggtttagaattttaattatattggtgtttaatataggaatatttatttatataatattttaaagtattaaatttatattagtatattattaaatggatatattattaaatgggtttaagtattttatatattttaatttaattgatttattttttttttgttttggatttttattatgatttaaatatttatatatgggttattttttagattttttatattatgaaatataagaaaaatttttaaggttagttttatgattaagacgaaggattttattgaatatataaaataataaatatattgtaatattttgtttttttttttgtagttgtaatttggtttgtttatattttttttttgtttttttgaaaattgagttagttttatttttttaggataggatttaataattataatataatttagtataattttttgatttaggtaaattatgtaatttgtgtttagtatgaaatgtatttaaaaataagtaatttttttttaatattattatttttaaattaatataataaataatagttattttaaaataaattgtttatttttattatgtagtatttaaattttaaggttgttatgattgtagatagtattttaaaatttttttttggaaatggttttgtttttaagatgatttaggaattaaagaggtgattattttttgtttaatgaatttttaaattataaatttgggaagtgttttagttttttattgttgttgttataaattattataaatgtgttagttaaaataaatataaaattattattttatagttttagagattagaagttaaaaatgggtttataaggttttattttttttggaaattttaaggggtaatttgtttttttgttttttttagtttttagtgattattaaattttttggtttatggtttttgtattttttttgtggtttgtgtttttatttttgtattttttttttgattgtgattttttaataaaaatatttggggttatgttgggtttattttgaaaattttggataattttttttaagattattaattaaattatatttgtaaagttttttttgttatataagttaatgtattaaaagtttttgaggattaggatatagatattgggggtgggggggtattatttagtttattataggaaggaattttagggttaattaaattagtttttttattttatatttgaagaaattgaagttttggaattggagagtattatgttaaatgaaataagttaaatatagaaagataaatattatatgtttttatttatttgtgaaatataaaataattatatttttagtagtaaagagtagaatggtggttattagagttggggggtgggaggaatggggagatggtaattaagatataaagttttagttaagatgggaggaataagtttgattgttttttttgagatgtgttttatagtatgatgaatatagttaaatagtaaattttaaatgtttttatttgataaaaatgttaaatatttgagatgatggataggttatttagtttgatttaataattttttattgtgtttaaagattataattttatattgtattatataaatatatataattgtattattttaatatataattttaaaattaatataatgaaaaagaaattgaagtttaatatttttagaagttaagtgtaatttaaaagttttgtgagaatttgttttaataaataaataagttttttttttttaataattattatattttgcgtttggatatatagtagtgaataaaaaaaaaaaaaaaaatttttaggtttaatataattttaggaagaaattttagtagttgtattttaggggaaatataggaagttagtttggagtaaaagttagtttgtttttgtttttttgttattttgttcgtgttttatagtgttttttgtttgtgacgatagtttcgtagaagttcggaggatataatggaatttattgtgtattgaagaatggatagagaatttaagaaggaaattggaaattggaagtaaatgtaggggtaattagatatttggggtttgtgtgggggtttgtttggcggtgagggggttttatataagtttttttttcgttatgtcggtttttattttggttttgattattttgttttttttggtagg

SEQ ID NO: 138 - DNA, 5660 bp, Artificial Sequence
  chemically treated genomic DNA (Homo sapiens)
tttgttagagagaatagaatggttagagttagggtgggggtcggtatgacggaaaggaagtttgtgtagagtttttttatcgttaagtagatttttatataagttttaggtgtttaattatttttatatttgtttttagtttttaattttttttttgagttttttatttattttttagtatataatgaattttattatatttttcgaatttttgcggagttgtcgttataggtagagagtattgtgaggtacgggtaaaatagtaaaggggtagggatagattgatttttattttaggttaattttttgtattttttttgagatataattattgaaatttttttttgaaattatgttaggtttggagatttttttttttttttttgtttattgttgtatatttaagcgtagaatgtggtaattgttaaaaagagaaaatttgtttgtttgttaaaataaatttttataaaatttttaagttatatttagtttttgggaatgttgaattttaattttttttttattatattagttttaaaattatatattgggatagtatagttgtatatatttatgtggtataatatgaagttatgatttttgaatataatggggaattattaagttaagttaagtaatttatttattattttaaatatttgatatttttgttaaatgagagtatttgggatttattatttagttatatttattatgttatgaaatatattttaaaaaaaataattaaatttattttttttattttaattgaggttttatattttgattattatttttttattttttttattttttagttttagtaattattattttattttttattgttaagaatgtaattgttttatattttatagataagtgagaatatgtgatatttgtttttttgtgtttggtttattttatttagtataatgttttttaattttaaaattttaatttttttaagtataaaataagaaggttagtttaattaattttaaaatttttttttgtggtaggttgaataatgtttttttatttttaatgtttatgttttaatttttaaaaatttttaatatattaatttatgtggtaaaagaggttttgtagatgtgatttaattaatggttttgagggagattatttagaatttttagggtgggtttaatataattttaagtgtttttattagagggttatagttagagagaagatataagaatggaagtataggttatagagaaaatatagagattatgagttaaggaatttgatggttattagaagttggaaaagataaggaaatagattgttttttagagtttttaaaaggaatgaaattttgtggatttatttttgatttttgatttttagaattgtaaaataataattttgtgtttgttttagttaatatatttgtgataatttgtaatagtagtagtaggaaattaaaatattttttaggtttatgatttgagagtttattaaataagagatggttatttttttggtttttaaattattttggaaataaagttatttttagagaggaattttaaaatattgtttgtagttatagtaattttaaaatttgagtgttgtatggtggaagtagataatttattttaggataattgttatttgttatattagtttgaggatggtggtgttaaagaggagttatttatttttaggtatattttatattaaatataaattgtataatttgtttaaattaaggaattatattaaattatattatggttattaaattttgttttgagaaagtgaaattgatttagtttttaaagagataaagagaaagtataagtaaattaaattgtagttataaaaagaaagataaaatgttgtagtatatttattgttttgtgtatttaatgaagtttttcgttttggttataaaattagttttaaaggttttttttatattttatagtatgaaaaatttaaaaagtaatttatatgtaaatatttaaattatgatagaaatttaaagtaaaaagaaaatgaattaattgaattaaaatgtgtaggatgtttaaatttatttgataatatatttatttgataatatattaatatgaatttagtattttaaaatgttatataaataaatgtttttatattaaatattaatgtagttaggattttaagttaatattatttttttttttttatatgtttttttttcgtttttattaaaaattgttaaaattatttattttttttttttttttttgtttttaaataaataaggttttttttaagatattgtaggattataaagttaaattttcgggtttaagttgttggtaaaattttagagatgttaagttatttatgtattaattatttttaaatttttttttaatttttttataaaataggagtagggagaggagaaatatttttgtttaaaaatgaggaattgaaaatttttattataaataaattatattaagtaagttaaagatagtaaaagagtaaaaatgttagtagatatttttaaaatggtaattatatattatttttggaatgattatatgaatgtggtttattattttttaagtttttatagtaaatatatatttatttgttttatttagttaaaaataaatataatatgtagttgtttttgaataatttttttttttttttttttttttttttttttttcgataaagttttattttgttatttaggttggagtgaagtggttttatttcgttgtttattataattttagtttttcgggtttaagcgatttttttgttttaatttttcgagtagttgggattataggcgtttgttattattttcggttattttttgtatttttagtagaggcgaggttttatttgttggttaggttggtttcgaattttcgattttaggtgatttttttcgttttgattttttaaagtgaagggattataaggcgtgaggtatcgcgttcggtcgtttttgaataatttcgattaaaatttatattcgatatttattttaatatatattatagatttttattgataattttttttagtaagaaagataagttttatttaggtatttgtgaattggaggttaagtagttttagtatattttatatttttttaagattttttttttattttaaacgttcgtaaattttgtatttgataaagagtatatttttatttaatataaatatgtttttttttttagatttttttagtattcgagagatttgtacgcgcgtggttttttattttttttttttggttttttaagtttttagggcgtcgttaggaggaggtttgtgattataaattttttttgaaaattttttaggaagtttttttttttttcggagaatcgaagcgttatttgattttaatttttttgtaaatttcgttttttagagtcgttcgttattttttgttttcgttgtagattttttatttatttggatcggttttcgatcgtaattattcggtgcgttgggtagcgttttcgtttttagtagcgttcgtattttttttattcgatttcgggtcgcggtcgtggttagttagttagtcgaaggttttatgttgtttttcgtcgtcggttttatgttgtttttcgtcgttcgttgtttgtttttttttttttcgtagtcgtcgagcgtacgcggttcgttttattttttggtgattagttagtttttttttttttttttttcggtgttggcggaagagtttttttcgattttgttttttaaattttttggagggatcgcggtatttttttaggtaaggggacgtcgtgagcgagtgttcggaggaggtgttattaatttcgagtatttagcgaatgtggtatttttgaagtcgttttaggttgggtttttttcgggggtattagtcggaagtagttttcgttagagttagcgttggtaaggaaggaggattgggtttttttttatttgttttttatatcgtttttcggtttttttgtttttagtcgcgttttttcgtttgttagtaaaggcgtgtttgagtgcgtttattttgttaaaaagaaattcgttttcgtttcgtttttttttttcgcgatataatttttttaattgttaaattgaatcggggtgtttggtgttatagggaaagtatggtttttttttttaattataagaaaaagtaaaattatttttttttagttgtgagagttttatcgagaatcgaaattatttgtacgattagaaagtgtttttttatttttttaatttttgatttttaggagcgcggggtttattaagttagaaattttagtttaaaggattttttttggagagtcggattgtttttttttttttttttttttttttttttgcgtgtaaaacggttgtttggggtaagggttttttagacgtgtatattgtttggtataagagtagattttgaaaagatgaggtttatttaatacggacgggggagaattttgtttgtaggtagataggaaaatggggagggagttattggaaggacggattttatttttaaagttataatttttagattagaaaaagtgtttagtgttttagaagtagagttgtatagtgatttaaagattagttttaaatattgttttgttttttttatattttttatattttttttttttattgaaaatattttgtatttttcgtaattataaagggggaagggaatatgagtgttttttgttttataggggttgttgtgagtttaaatgatgtattaatatatataagttttaagaatagtgttatatattttaagttaatatttgttagtttttgaattattcgttttgaggattggtttgtaattttgttttgaggtatagaaagaaaatgttttggagtaggacgcggtggtttatatttgtaattttagtattttgggaagtcgaggcgggtagattatttgaggttaggagttcgaggttagtttggttaaaatggtgatatttcgtttttattaaaaatataaaaattagttggttatggtggcgtacgtgtgtaattttagttatttaggaggttgaggtaggagaatcgtttgaattcgggaggtagaggttgtagtaagtcgagatcgcgttattattttttagtttgggtgatagaatgagatttcgatttaaaaaaaaaaaaaaaaatgttttggatagaattattattattatataaaaggaaagttcggatgcggtggtttacgtttataattttagtattttgggaggtcgagataggcggattatttgaggttaggagttcgagataagtttgattaatatggcgaaattttgtttttattaaaaaatataaaattagcggggtttggtggcgtatgtttgtaattttagttattcggaggttgatgtaggagaatcgtttgaatttaggagaaggcggaggttgtagtgagtcgagatcgcgttattgtattttagtttgggagataagagcgaaatttggttttaagaaaaaaagaaagaaagaaagaaagaaagattaagaagaatttattttttgaaaagattatgggtattttttattatttttatttataaagaaaagttaaatagtattaaagagtataataagcgtaaggaggtaaaagttttaatt

SEQ ID NO: 139 - DNA, 5033 bp, Artificial Sequence
  chemically treated genomic DNA (Homo sapiens)
gaaaattaggttgagtaggttggttttttaaagaaatttattgagtttttataatgttttttttatttgacgggagaaaaggggttttggaagattaagtgtgaagttttagaattttgtttggagttggttaggattatttaggtttgagtataagtaaagcgttgttcgtggtgttagtaagcgcgaatgttttcggtaacgttttttttatttaaagttgttttttatttagttaatttgtttcgcgaagtttatatatttgtttcgtgtaagatttttagttattttatttagttattggttttttttttattattattttttatgttttttttaaagaaaaatattattttttatttttttattaattttaaatagtttttatttttttgatatatttattatttaagaaaatggtttaagaattgggttagattattttgttttaatttttttgataagttttagagaaatttaaaggttaaaataagagtataagagtaaaaggtagagaaattaagaaattgaagattaggaaatgggggttggatgggaaagaaaaagaaattgttattaatgttattcggtttttttttttgtttaggtggattttagttttgttgaggttttgttagtagatttttagttttaattagtatttttatggtggtggtatttttattgtttttaaaagaaagagttttttttaattttatagggatttgggggatgaggagttagagttaaggtattttaaaaaaaatatgtgaagatttttattttgtaatatataagtaattgtttttttgttaagattttgttttttttagtatttcgaattaaaatgattttgtaaataaaaattgtttatttttaggagaggtttatttatgtagttttttattaaagtttttaggtaataaatttataatttgcggttttttttttatttaatgtagtattcgttgaaatgttttaaatattttaagtaataaatgttgatttaaatttatttaggaagattaggaaggggaaaaaaagtatttggtatttaaatttttagaagagaatttaatgataggtttagtttgtttaatgataagtttagtattatattttttttttatgatgttttattattattgtataaattttttttattatttatgataaataaaaataagatatttgataaagtgggtttaaataggtaagagtgtaaataaagatttattgtataaatatgatgaaattgggattttagatttttaaagtataatttttttttgttttatgtgtgttaggttgttatttttaatttcgaattagttttttttttttttaagggttgtatttataatgtaaaaatggaaagaattaaaaagtatacgtaaaatatgattttcgggatttttttttatttttatggttgattaatttaaatagaaagatatatttaagagaaaattgttaagtttgatataagttatgaaatttgtgaagtttaagtattgtttggggatgaatttaatttgtatgataggtgtagagttgtcgtttttagatattttaagaaatacggagttattttgaatgattttttttcggttataagggagttattaacgtttttatagtgaaattaattggttggttgaaggaatagaaattttttgtttcgtttattggggattaggagttgagggtagtggtgaatatttttaaaatattagttttggttttattggatatttagcgagtagtgtagttagtatttttggcggttttttggtttagtttttggcgtatgcgttttagtatttttgggtaggttttttcgttttcgtgacgcgtcggttcgggtttggtttttcggcgattatagcggatagggggcggagtttaagggggtggggagacgtcggttttttggtttagttgaaaacggaattttttgtcggttggttttttattttgttagagcgaggcggggtagtgaggatttcgcgacgcgttcgtattttgcggttagagcggttttgagttcggttgcgttcgcgttaggcgtttttttttagaagtaatttaggcgcgttcgttggtttttgagcgttaggaaaagttcggagttaacgatcggtcgttcggttattgtacggggttttaagtcgtagaaggacgacgggagggtaatgaagttgagtttaggttttttaggaaggagagagtgcgtcggagtagcgtgggaaagaagggaagagtgtcgttaagtttacggttaacggtggattattcgggtcgttgcgcgtttgggggttgcggaatgcgcgaggagaataagggtatgtttagtgggggcggtagcgatgagggtttggttagcgtcgcggcgcggggattagtggagaaggtgcgatagtttttggaagtcggcgcggattttaacggagttaatcgtttcgggaggcgcgcgatttaggtagttggggttttagggtttcgtcggtagggggcgcgcgaacgcggggcgcggtttcggcggatcggggttggaatttagatcgtcgatgtagatttgtataggagttttcgttggtcggaggtgtgtattttacgcgtaaaataggtttttatttagtaaaaattttaaagagagatattgaaaaatttattgtttaagttttttttagtggtttttgttttgttattttatgattagagatgtaaggaatagattgaattggggagaaaaggagaaaaggaaagtttatttagggaagaagattattttgtttgtttgtttttaacgataaagataagtaaagtataagttacgtattttagattggatttaaggaattttataaaattatagtatatggaaaaaattaatgtaaatttttaagttattatatgaaatttgttgtattgtttttttatagaggttaattgagaatgagacgggattttttaattatagtatttagttttttttatgttagtagtgttttatgagtgatgtataagagaaaaaatatatagttttataggttttttattttttaattattatatttagtgtttagattataaaaatatttttgtagtaattgttaggttttttttgaatggtaaaggatttttataaataatgtatttttatttttattgttaaaatatatttatttaatgtttaagtacgaattttgttttaattagtattgatattttttattttttttataatttcggataatttttttgtattttatcgttggttagtggttatatttagtatttattttattattattttttaaaattaagttaatattaagggattttgttaatagtatagattttaaagaagtgtttattttttttgaatttttagaataatggtataataaatgagggatttttaaaggagtaaaaatattgtaaagtgtattttaaaaatttaaaattttattaataattataaaaataagttatatatgtaatttattattttttgaaatattaatagtagttatttttttttttttttttatgtaaaatatttttatattattagtagatataatttattacggtttttaagagatgaaatgaatatttttaatattaatgaaataagttaataaaatatgagaagtatattgttttttaattaaatggtatattttaaagtgtataaatttataataaataattcgattttagatatttagttattaaaaattgttttataattgattttaaatatgatagtaaatgtttttataatgtttatgtatataaatggttgttataggattatttttgtaaaatattattttttttaagttatgtattattttgattgattgttaatatttaagttttatttatttatttatttattttattttttttgagatgaggttttattttgtcggataggttggagtgtagtggtataattttagtttattgtaattttttttaggatgtaagcgatttttttgttttagttttttgagttgttgggattataggtacgttttattatgtttagttaattttttattttttgtagtagagacgggattttattatgttggttaggttggtttcgaatttttgattttaggtgatttgtttgttatggttttttaaagtgttgggattataggtataagttattgggtttggtttaagttttttttatatagtaaaatatttattgtttaatatttttaaattttagttattataaaattttgtagtatataaatatagttagttttatattatattaaaaatattatagtttaaatttaaaatgatgaattgttaaggaaaaattatttattataattttataagattttgtatgatttaatttattttttttttttaatttttaattttggtttaaattattatattataagttagttatgagtttagatatatgataaataaaagtttttcgtacgggatttgttatgagaattaaataaattaaaaaaaaaagaaagaaaaaaatttagttgtttatttttttttttaaattattatttttaatttttaataaatagtagttgattatttaataaatatttgtagatttggattatggaggaggggttagtaaggtaaataatttaaaattttaaaagtcgaataaatttaattttgtttttaaattatttaataaaatagatttttatgttttaatggaaattaagatttgtttttttataatgatgattattattttattattaatttttttgtttttgtacgtttagagaataaaatggtatttaatttgtattgagtataatttgaaggtggggtgggaaagtggattgtattagtaaatgaagaaatattagatattagagatttgaatatttttgtattgggtgaaaattttgtaattaggtgtttttttaaatggttttatttgttttgtttcggtcggtattttttatatttgtttttattttggttttgattattttgttttttttggtagg

SEQ ID NO: 140 - DNA, 5033 bp, Artificial Sequence
  chemically treated genomic DNA (Homo sapiens)
tttgttagagagagtagagtggttagagttagggtgggggtaggtatgggagatgtcggtcggggtaaggtaggtggagttatttaaagaaatatttaattgtaaagtttttatttagtgtagaggtgtttaggtttttgatgtttggtgtttttttatttgttgatgtaatttatttttttattttatttttaggttatatttagtataaattaaatgttattttattttttaaacgtgtagagataagaaagttgatggtaaagtgatgattattattatggaaaaataaattttgatttttattggaatatgggaatttattttgttaaatgatttaggggtagagttaaatttattcggtttttaaagttttaaattatttgttttgttgattttttttttataatttaggtttataaatatttattaggtagttaattattgtttgttagaagttgggagtaatggtttaggggagaaaataaataattaagttttttttttttttttttttttaatttatttagtttttatagtaaatttcgtgcggaaggtttttgtttgttatgtgtttgagtttataattggtttgtagtgtgataatttgagttaaagttggagattagaagggaaaagtaaattaaattatgtaaaattttataaaattataataaatgatttttttttaatagtttattattttaaatttagattataatatttttaatgtaatataaaattaattatatttgtatattataggattttataatagttaagatttaaaaatgttaaatagtaaatattttgttatataaaaagagtttgggttaggtttagtggtttatgtttgtaattttagtattttgggaggttatagtaggtagattatttgaggttaggagttcgagattagtttggttaatatggtgaaatttcgtttttattataaaaaataaaaaattagttgggtatggtggggcgtgtttgtagttttagtaatttaggaggttgaggtaggagaatcgtttgtattttggaagaggttgtagtgagttgagattgtgttattgtattttagtttgttcgatagagtgaggttttattttaaaaaaaataaaataaataaataaataaatagagtttggatgttagtagttaattaggatgatgtataatttagaaaaaatgatgttttgtaggagtaattttgtagtagttatttgtgtatatgaatattatgaaaatatttgttgttatatttaaagttaattataagataatttttggtaattaaatgtttaaaatcgagttatttgttatgggtttatgtattttaaaatatattatttaattgaaaggtagtatattttttatgttttgttggtttgttttattaatattagaaatgtttattttattttttaaaaatcgtgataagttatatttattagtgatgtaaggatattttatatagaaaaaaaggggaaaatagttgttgttagtattttagaaaatggtgaattatatatataatttgtttttataattattaataaaattttaagtttttaagatgtattttataatatttttgtttttttaaaaattttttatttgttatattattattttaagaatttaaaagaaatgaatatttttttaaaatttatattattaataagattttttaatattagtttagttttagagggtgatagtgaggtgagtattgaatatgattattagttaacggtaaagtataaaagagttgttcgagattgtaaaagaaataaaaaatattagtattaattaaagtaggattcgtatttaaatattgaataagtgtattttaataatgaagataaagatgtattatttatgaagattttttgttatttaaaaaggatttaatagttgttgtaggaatatttttgtaatttgggtattgagtatgataattaaagaatgagaaatttatagaattatatatttttttttttatgtattatttataagatattgttaatataaaaggaattaagtattgtggttgaggaatttcgttttatttttaattaatttttatgagaaaataatataatagattttatatagtagtttagaagtttatattgattttttttatgtattatgattttgtagaattttttaaatttaatttagaatgcgtaatttatattttatttatttttatcgttgaaagtagatagataagataatttttttttttaaataagttttttttttttttttttttttttaatttagtttattttttgtatttttgattatgagatggtagaataaaaattattaaaaaaagtttaaatagtgggttttttaatgtttttttttaggatttttgttgggtaaaagtttgttttacgcgtggaatgtatattttcggttaacggagatttttgtataaatttatatcggcgatttaggttttagtttcgattcgtcgaggtcgcgtttcgcgttcgcgcgttttttgtcggcgaggttttggggttttagttatttggatcgcgcgtttttcgaaacggttgatttcgttgggattcgcgtcggtttttaggagttgtcgtattttttttattagttttcgcgtcgcggcgttggttagatttttatcgttgtcgtttttattgggtatgtttttgtttttttcgcgtatttcgtagtttttagacgcgtagcggttcggataatttatcgttggtcgtaaatttaacgatatttttttttttttttttacgttgtttcggcgtatttttttttttttaggagatttgggtttagttttattattttttcgtcgtttttttgcggtttggggtttcgtgtagtggtcgagcggtcggtcgttagtttcgggttttttttggcgtttaagaattagcgggcgcgtttggattgtttttgggaaaaagcgtttagcgcggacgtagtcgagtttaaagtcgttttggtcgtagggtgcggacgcgtcgcggagtttttattgtttcgtttcgttttggtagagtggggagttagtcggtaaagaatttcgtttttagttgggttaaggggtcggcgtttttttatttttttaggtttcgttttttgttcgttgtgatcgtcgggaggttaggttcgggtcgacgcgttacgagggcggggaagtttgtttaaagatgttaggacgtatgcgttagagattgggttagggagtcgttaggaatgttggttgtattgttcgttggatgtttagtaaagttaaggttaatattttgggaatgtttattattgtttttagtttttaatttttagtaggcggagtagaggatttttgtttttttagttagttagttggttttattgtggagacgttggtggtttttttgtgatcgagagaaagttatttaaaataatttcgtgttttttaagatgtttgaaagcgatagttttgtatttgttatataagttaaatttatttttaggtagtatttgggttttataagttttataatttgtattaaatttagtaatttttttttggatgtgtttttttgtttgaattagttaattataaaaatagagaaaaatttcgagaattatgttttgcgtgtgttttttaattttttttatttttgtattatggatataatttttaaaagagaaaaaaattagttcgagattgagagtggtaatttggtatatataagataaaaaaaaattatattttaagaatttgagattttagttttattatatttgtatagtaaatttttgtttgtatttttatttatttaaatttattttgttaggtattttatttttatttattatgagtaataaaggaaatttatgtagtaataatgaaatattataagagaggggtgtggtgttgggtttgttattaaataggttgaatttgttattaaatttttttttgaagatttaaatgttaagtgtttttttttttttttttaatttttttaggtgagtttgaattaatatttattatttaaaatatttaaaatattttagcggatgttatattggataggaagagaatcgtaagttatggatttgttgtttaaaaattttggtgaggaattgtataagtggattttttttaaaagtgaataatttttgtttatagaattattttggttcggagtgttgaggaagataaagttttaataggagggtaattgtttgtgtattgtaaaatgagagtttttatatgttttttttaggatattttagttttgattttttattttttaaatttttgtagaattaaaaaaagtttttttttttaaaggtagtggaagtgttattattatggaagtgttggttagggttgaaaatttattgatagagttttaatagagttgaaatttatttggatagggaagggaatcgggtagtattaataataattttttttttttttttatttaatttttattttttagtttttagttttttaatttttttattttttatttttatgtttttgttttgatttttgagtttttttgaaatttattagaaaagttaggataagatagtttgatttaatttttgagttatttttttaggtagtaaatatgttagaaaaatgaaagttgtttggagttgataaggaaatggaagataatgtttttttttgagggggatataaagaatggtgatagggaaagaattaatgattaagtaaaatgattgagaattttgtacgaggtagatgtgtgagtttcgcgaagtaagttgattgaatgaaaaataattttgggtagggaaaacgttgtcgggggtattcgcgtttattagtattacggatagcgttttgtttatatttaggtttgggtggttttaattagttttagatagaattttaaagttttatatttgattttttaaagttttttttttttcgttaaatagaaaggatattatggaagtttaatgaatttttttgaaaaattaatttgtttaatttggttttt

SEQ ID NO: 141 - DNA, 5942 bp, Artificial Sequence
  chemically treated genomic DNA (Homo sapiens)
taaggattaggattttaatataaatttagttttttattttttcgggttttttatgtttttttaaattcggtcgttttttatagttttttgtttttgggtttttttttatattttttattatttttttatttcgtatttaagattttatgaaaggtttttttagaaaagaaaaaatgaggagttttgcgatttgaatagtttttttttgttcgtttgtaaatttgaatttttggattttataatagtgagttttttttgtgtttattattcggtatgagtaagataagggggtgggtggtgggagagtggggaagtgtgggaaagaaaagtgtagataaatgggtggaataaagaagtttgatttaaagtttagatttgggggttagagttttggttttagtttaattaagtgtataagtttgataatcgtgggtttttttattatattggttttttttagtaaaattttatttatttttatttttagaggttttgattttttttattattttgtattataatatttgataatatgggtcgggagtggtggtttatgtttgtaattttagtattttgggaagtcgaggtcggcggattatttgaggtcgggagtttaagattagtttggttaatatggagaaatttcgtttttattaaaaatataaaattagttgggcgtggtggggtatgtttgtaattttagttattggggaggttgaggtaggagaattttttgaattcggggggtagaggttgtggtgagtcgagattatgttattgtattttagtttgggtaatgagagcgaaattgtattttaaaaaaaaaagaaaaaaattgataatatggtattttttttttttagttgtgaattttttgagggttgggaatgtttttatttgtatttttggtatatagtatatggatttatgtttgtgaaattagtgaattggttgtagttagggaattttttttgggggaagtgagatttgtacgaagttgggtaatttttggtttaggggggttgaaagaataggtgggggatttttaggagggtttgggatttgaaagtgaatttagattggtagggaggtgattttattatgttatttggagaggttgttttttttgatttaggtgggatttgtatgtggtttttaggtttttgtttggtttttttaaaatagtttttagaaaagtgaataaattataaatggttgatttatttttgatttttagttcgttttttacgaagatagagtttattgattaaaaattttaggatttgtatttgggtagattttaggaaggggaagttaaagggtttaggttagaggtttaagtttagattttagtagtagattagggttagattttattaaagttagaattcgaggtttatgtaagtttttagatttcgtttttaagttttgtttttttttttttttttttttttttttttttagtttagtgtggttattcgagggggttttttttttttagttatagttcgggtattttaagttgggaaatgtgttattcggggttggggtgttgatttgtagtttagttttttttggttttttttgaggatagtggggatgggattggtacggtttttatttcggggttttagttttatttttggtttttagtttttttttagtagtagtttgaagttcgggttggagatgggtattttaagtggaaggttgggaggttgaggattttgcgatagtgatagtaggtgagtagtggatgtgcggtggttggaattttggaagtgggtgttatagttttcgtagtattggagggagggagtaggagatttgtagagaaagaagaaaaagtattaagggtaggggaaggaaaaggggaagagttgaggttttagagggggttggtagggtagaataggatttttttagtttttttgttaaggaataaattgttagttaggtatagtggtttacgtttgtaattttaatattttgggaggtagaggcgggtagatggttttgagtttaggagtttgagattagtttgggtaaaatggtaacgtttgtttttttttttttttttttttgagatggagttttgttttgttgtttaggttggagtgtagtgttatgattttggtttattgtaatttttattttagcgatttttttgtattagttttttaagtagtcgggattataggtatatgttattatgtttcggtaaagtttgttttttataaaaaatatgtttgagtttaggaagcggaggttgtagtgagttgaaattatattattgtatattagtttgggcgatagagtgagatgagtgagattttgttttaaaaaaaaaaaaaaaaaaaaaaaaagggataaattgtttttttttttatttaatagtgagggatttaggttggtttaaaggtggtggtgagttatttgaattaattgtttatttagttatagattaaattttttattttatttttttttttttttttattattgtatttgatttgttttaaaaataaatttttttaaattattgtgggatttagagtagaatagttgaaagaaaaaaatggtaattagatttagtaaatttttgggtaaggggagggatattagttataatgattatagttaatatttatgtattgtatattatgcggtatgtattattttagtattttatatatattaatttattgaattttaataacgatttttattatttttatttttaagatgagaaaattggaatatgtagatattaggttgtttgtttaagtaagtggaattaggttttaaatttagggagtttatgtttataattatttgattatattattttgttaatttatatatgaggataaggaaagaattttttagtattgtgttggggcgtttggtgtggtgtggttgggagaggtagaatataatgagatatgggtttgagttaaagtttttttttatcggtttttcgggttttttgtttttttatggttttttttgattatgcgggttattttagggaagttagtttttttagcgagttgagtcgtatttttgttatttagtttatagatttttatttaggtagttttacggtttaggagatagtttatagttgttttttggttcgttcgagtagtatatattagtggggtttattagaaggtatttcgggcgttgatattttttttagttttttttgttttatgcggttttagtagttttttaagttttggtaggttttttttttgggttgtttttagtattcggtgagttattttatttttagttttaagggattttttttgtttatgtttttttgatgttttttttgttattgtttttgttgttggtgtttttattattttttttttttttttttttttttttttggtaggtttagtttgagatttttgggagttaggagcgttgtttttatttttaattagggttttatagaaagttcgggttgtagttttatttagggtggattttggtttttcgggttgtggttgttgttgtttatttttttagaggtcgttggggttagtggttggggtgaaggtgatgagtaagggtcgggatatggtttttgggagaattgagaaaatgatattaggtaagggaaggatgagataagtaagttaagttcgtggtgattttgtagtaattatagttttagagatttgttgggatgagaaaaagtagttaaaaatatttttttgttattaaagtaattttataatttaggattttgtagggtttaagggagagagattttgcgtaaaaatatggaattttataatatcgattttgttttttagtaaagattaataaaattttatgagattgttgtttagaggttttgcgttcggtttttatttttatttttattaataataaatattagtttttttttgaaattatttttttatttcgtaagatatattagtaggaaaaaaaaattagtttggttttttaagtttttcgcgattttatttcggagttttttttttttaaataaaaatagatgggttattttttagaagatttcggggagagttttttatacgtgttgttgtgtagttttcgtatcgtaaaatggcgttattttaattagaagagttgatataattaaatagttatacggtacgaagacgtatgcgtggcgataataataataaaaattataatttatattatttgagggttcgggcgtgcgtaaagtttcgggtttagtttttcgcgttggaatttttttaatagtaaacgagtaaagtttcgcgcgtttaggtggcgcgagtattaggatttgtcggttggggttttatttttatataacgtttttataatgtttttcgttttttttaacgtggttttcgttttaagtttattttttggagttaggaatttattttgtgggttaggaaaggtttttaggaggcggagggaaatttgtggaatgtcgagaagtcgtgtaatgaaataacgttacgtttgttttttattattattttgattagggttcgaaggttatatttagagtttaaggggaaatggagaagtgtaaagggacgagtagaatggttggtattattttaggttagcgtattgggacgttttagtttttatatcgtttattttattttatttaagtttttacgtacggagttaagtcgtatttttttttttatgaggtaggagttcggaggaaatagtatgttcgttaagggtttttggcgggattgattcgtattaggggtttaataggtaataaggatttagcggattggtcgaggataggttagttttttgggtagtagcgtcgcgtcgggattagaggggaacgtgaggagagttgcggaaagagatttagtttggttttttttttttttcgttttaagttagtttttttatttagtgagtataaaattgtattgtttagattttcgggtttcgaacgttatatttggttttcgttttcggtggtttttcgttgtgtttcgttcgtaagcgttttttttcgggttttcgtgatagttaggtcgtgcgcgggttattttgggattggtagttcgtttttttttatttagttagtttttttttttatcggggatttcgtgtttcggtatttatcgcggtatttgatttttggcgtttgcgtgttgtttttttttttattttttttaatttttattttttttattttatttcgtttgtcgcggtcgggttcgcggtttgcgttgtagcggtcgtcgtcgttttttggaagtagtaatttttttattttattttagttttggttttcgtttagtcggtgagtttgaagtcgtcgttgtttcgagttttttgtcgttgggagcggtatatggggttttcggattttgatgtgggggcgggggaggaagcgattaggttcggtacgaaggagggagaggtggtttgaggagcggaggggggatgtgtggatttcggtgaaagggatttgataatcgtttttaattcgtgagaaaaggaggagttcggtttttgtttgagaatgataaatttggaaatttttgggaaaggcgtgggggttatgtagagatttgtattggtagggagtttgagtcgaggtttttgtcggagttgatatagaggagagagggttttggttttcgggagttttagggatgtgggtcgggttggtgggttaaagtatttgttggttttttttaagtggtgggattttaaagaatgtttaattttaaagaaaaggggttgagatgtaaattagaggagttggagaggagtgttttagagtttgggttgttttaagaaagggtggtttcgaattttttcgtggttggagggtcgaatgtgggaggagggaggatattagaggtagggaaggagaatttgagttttattgatattgttttttttttagt

SEQ ID NO: 142 - DNA, 5942 bp, Artificial Sequence
  chemically treated genomic DNA (Homo sapiens)
gttagaaaaagaatagtgttagtaaagtttaagttttttttttttgtttttggtattttttttttttttatattcggttttttaattacgggagaattcggaattatttttttttaaagtaatttaaattttgaagtatttttttttagtttttttaatttatattttagttttttttttttgaagttaaatattttttggggttttattatttgaaagaagttaatagatattttgatttattagttcgatttatatttttggagttttcgaaggttagggtttttttttttttgtgttaatttcggtagggatttcgatttaggttttttattaatataagtttttgtatgatttttacgttttttttaagggtttttaagtttattatttttaagtaagaatcgggttttttttttttttacgggttgggggcgattgttaggttttttttatcggaatttatatatttttttttcgttttttaggttatttttttttttttcgtgtcggatttggtcgttttttttttcgtttttatattaaagttcggagattttatgtgtcgtttttagcgataagggattcggagtagcgacgattttagatttatcggttggacggggattaggattggggtggggtagggaagttgttatttttagggaacggcggcgatcgttatagcgtaggtcgcggattcgatcgcggtaggcgaagtggggtggggggagtggaaattagggagggtggggaagagggtaatacgtaagcgttaagggttaggtgtcgcggtggatgtcgggatacggagttttcggtagagaaagaaattggttaaatgagagaaagcgaattattaattttaggatgattcgcgtacgatttggttgttacgaaggttcggaggagggcgtttgcgggcggggtataacgagaagttatcggaagcggaagttaggtatggcgttcggggttcgggagtttgggtaatatagttttgtgtttattgggtgaagaggttgatttagggcggggaaaggaggaagttaggttggattttttttcgtagttttttttacgtttttttttagtttcggcgcggcgttgttgtttaggggattggtttattttcggttaattcgttgggtttttattgtttgttgggtttttagtgcgaattagtttcgttagagatttttgacgggtatattgtttttttcgggtttttgttttatgaggggagaggtgcggtttggtttcgtgcgtagggatttgggtggggtggggtgggcggtgtgagaattggaacgttttagtgcgttaatttgaggtggtgttagttattttgttcgtttttttgtatttttttatttttttttaggttttaagtgtgattttcgaattttggttagagtaatggtgaggggtaggcgtgacgttattttattatacggtttttcggtattttataggttttttttcgttttttgagggttttttttaatttatagagtggatttttggttttagaaaatgggtttggagcgggggttacgttgaggaaggcgaagggtattgtgggggcgttatgtaaaagtaggattttaatcgatagattttagtgttcgcgttatttgggcgcgcggagttttgttcgtttattattgaaaaagttttagcgcgggaaattgaattcggagttttgcgtacgttcgagtttttaagtaatgtgggttgtggtttttgttgttgttgtcgttacgtatgcgttttcgtgtcgtgtggttatttgattgtgttaatttttttgattagaatggcgttattttgcggtacggaagttatatagtaatacgtataggagatttttttcgagattttttagggagtgatttatttatttttgtttgggaagaggaaatttcgaaatgggatcgcggaagatttaaagggttaggttgattttttttttttattggtatgttttacggggtgggaaagtggttttagaaagaggttggtgtttattgttggtgaggatgggggtgggggtcggacgtaggatttttggataatagttttatggagttttattaatttttattaaggagtaaagtcggtattgtagggttttatgtttttacgtaaagttttttttttttaggttttgtagagttttaagttgtggggttattttagtggtaggaaagtgtttttgattatttttttttattttagtaggtttttgaggttgtggttgttatagggttattacgagtttggtttatttgttttattttttttttgtttggtattatttttttagtttttttaaaagttatgtttcggtttttgtttattatttttattttagttattgattttagcgatttttggaaggatgggtagtagtagttatagttcgagaagttagagtttattttggatggggttgtagttcgagttttttatgaggttttgattggggatgagagtagcgtttttgatttttagagattttagattgaatttgttagagaaagaaagagaaagaaaagaagaataatgaaggtattagtagtagaagtagtggtagaaggagtattaggaagatatggataagggagattttttgaggttgaggataagatgatttatcggatattgagggtagtttaggagggggatttgttagaatttaggagattgttggaatcgtatgaggtaggaggagttggggggaatattaacgttcgggatgttttttggtggattttattgatgtgtgttgttcgagcgggttagggggtagttgtgagttattttttgggtcgtggggttgtttgggtgggggtttgtgagttgagtggtagggatgcggtttagttcgttgaagaagttggtttttttgaggtagttcgtatggttagggagagttatggagagataaggagttcggaaaatcggtaaggggaaattttagtttagatttatgttttattgtgttttgttttttttagttatattatattagacgttttagtatagtgttgaagagttttttttttatttttatgtgtaggttgatagggtagtatagttaagtggttataaatatgagttttttggatttaaagtttgattttatttatttgggtaaataatttaatgtttatatgttttagtttttttattttagaaatgggggtagtaagaatcgttgttaggatttaatgggttaatatatgtaaaatgttagaatagtgtatgtcgtatagtatgtaatatatgaatgttagttatagttattatgattaatgtttttttttttgtttaagagtttgttaggtttggttattattttttttttttaattattttgttttggattttataatggtttaaagaaatttgtttttaagataagttaagtgtagtagtgagaaggaggggaaaagtggagtaaggagtttgatttgtaattgagtgaataattaatttagataatttattattatttttggattagtttggattttttattgttaagtaggaaggaaggtaatttgtttttttttttttttttttttttttttttgagataaagttttatttattttattttgtcgtttaggttggtgtgtaatggtgtgattttagtttattgtaattttcgttttttgggtttaagtatattttttgtagaaagtaggttttgtcgggatatggtggtatgtgtttgtaatttcggttatttgggaggttgatgtaggagaatcgttaaggtggaagttgtagtgagttaggattatggtattgtattttaatttgggtagtagagtaagattttattttaaaaaaaaaaaaaaaaaaaagtaggcgttgttattttgtttaggttggttttaaatttttgagtttaaagttatttgttcgtttttgttttttaaagtgttgggattataggcgtgagttattatgtttagttggtaatttgttttttagtagaaaagttgaaaagattttattttattttgttagttttttttgaggttttaattttttttttttttttttttttgtttttaatgtttttttttttttttttgtaggttttttattttttttttttagtattgcgagaattgtgatatttatttttaagattttaattatcgtatatttattgtttatttgttgttattgtcgtagggtttttagttttttaattttttatttggggtgtttatttttagttcgggttttaaattgttgttgagggggggttgggagttaggaatggggttgggatttcggggtgagggtcgtgttaattttatttttattgtttttaagagagattaggaaggattaggttatagattagtattttagtttcgagtgatatattttttagtttgggatattcgagttgtggttgggagggagagattttttcgggtggttatattgagttggagggaggagagaaggagggaggagaaagatagggtttgggagcgggatttaaggatttatatgaatttcgagttttgattttggtaaagtttgattttagtttgttgttgaagtttgaatttgggtttttgatttgggttttttgattttttttttttgggatttgtttagatgtagattttgaagtttttggttaataggttttgttttcgtgagagacgggttgagagttagaaataaattaattatttgtggtttatttatttttttggaagttattttgaggaagttaaatagaagtttgggagttatatgtaagttttatttgagttagaaggggtagtttttttaggtggtatgataaggttatttttttgttaatttgggtttatttttaggttttagatttttttgggagttttttatttatttttttaatttttttggattaagaattgtttagtttcgtgtaagttttattttttttaggaggagttttttgattatagttaatttattgattttataaatataagtttatatattatgtgttaagaatataggtaaagatatttttaatttttaaagagtttatagttggagagggaaagtgttatgttattaattttttttttttttttttgagatgtagtttcgtttttattgtttaggttggagtgtaatggtatgatttcggtttattataatttttgtttttcgagtttaagggatttttttgttttagtttttttagtagttgggattataggtatgttttattacgtttagttaattttgtatttttagtagagacggggtttttttatgttggttaagttggttttgaattttcgattttaggtgattcgtcggtttcggttttttaaagtgttggggttgtaggtatgaattattattttcggtttatgttattaaatattataatgtagggtgataagggaagttaaggtttttagagatgagaatgggtagggttttgttggaagaggttagtgtgataggagggtttacgattattaagtttgtatatttagttgaattgggattagaattttagtttttaaatttaaattttaagttaaatttttttgttttatttatttgtttatattttttttttttatatttttttatttttttattatttatttttttgttttgtttatgtcgggtggtaggtataagaagagtttattgttgtgaaatttaggaatttaaatttgtagacgggtaggggagggttgtttaagtcgtaagattttttatttttttttttttgggaaagttttttatgaagttttggatgcgaaatggaggagtggtgggggatgtggaaaagaatttaggggtagggggttgtagggggcgatcgagtttagggaagtatgagaaattcgggaaaatggggagttgggtttatattaaggttttggtttttg

SEQ ID NO: 143 - DNA, 6090 bp, Artificial Sequence
  chemically treated genomic DNA (Homo sapiens)
tagagatggaatgtttaaattaggataatttagggaggtgtgggagaggtgtagggggattataagggatggagtaggaatttaaggtagtaatagtagagttggtattaattttaggtttaaaaagataaaggagagagagtggttattaaaatttagaaagagaaaattcggtaaaagacgggatttggtgaggagtagtaatttgtgtttggttgtggattgtggtaattttgtagggaggagagtagaggaatgattattttggttttatttttttttttttttttttattttatgttaggtgttttattggttaaatttattagtaattagaggataaggaatgtattaaaataattttacggtttagagagtagattagatgtagagtgataaatggattatatttagtataatcgtaggtttatttgttgattcgttttttttattagattgagttatttgaggatagagaatgttttttttatatttgtatttttaatatttggtggatattagatatttaagaaatgtttatggacgggattagagaagatggtaaattgggtattagatggaggtttgtgttttttgagtttgtcgtatgttttttggcgaatttaaggtaaaatgagaaatagaatgagttttgtatttttgtttggtaaaagaaaatatgatttggtgagaagaaatgaatatttttagtatttagtgttgggaggaattggaattagttatgtgattgtttttattagaggtttttaattgcgtaacggatagaatttttaatggtgaaattataatgtagaaatatttttttttttttttttttttttttttttgagacggagttttgttttgttatttaggttggagtgtagtggtattatttcggtttattgtaagtttcgtttttcgggtttattttatttttttgttttagttttttaagtagttgggattataggtatttgttattatatttggttaattttttgtatttttagtagaaatggggttttatcgtgttagttaggatgtttttgattttttgatttcgtgatttgttcgtttcggttttttaaagtgggaaatatttttaaaaatattagtttttgataaaattaaagttatgttataaaaaagtaattaaaaggtggaaatgagataatatggtttattttgagttgagaatattttgttagaaaatgattgttttagattttaaatttgattttttatataaatttttagtgtaattttttttgtattatttttttttttattagttaaaagatggaaaggataaattgaggaatttacgttggaggagtatggatttattagatggtagaaatttgggtttttgaatgattattgtggagttgatttttgtttatgttttgtaaatttttgtgttgagagtaagtaatatatttttaatgtgttaaatttttgggatttgttgggttttatagtaatggttattttattttaatacgattgtaaaataatgttttaaaatttatagtcgggtttgtttaaaatattatcgttattattattataatttatagtttatattataattatttttatagaagttttttttaattggtattttataatttgtggttttttatattgttgttttttatgtgtgagatgtttttttgagttttttttgttagggatatgatagaaaataaaatatttaatattttggtgtattttataatgtataaagttttgttttatgtattatttttttagatttttttaataaatttaaggaatatgtaagggtttataattatttttattttataggtgatgaaattgagacgtttatatgtaaagtggaaataattatttatttatttatttatttattaaataaaaatttcgttaatttatttaaagattaattgagagaattattttatttgtttggaatttggtatgtgttaagagaaaagtttttttaatttttttttttaagaagataatttattgttatataataaattattttgaaataatgatttaaaatattaaaagttattgattttgtttatagaatttgaattggaagatataaataattgggagtgagggtggggttggatagttggtttttttgggtatttttcgttttttttgtggttttgttatatgtttttatatggtagttttagggtaattatgatagttgaaggttttagagtgggtggagggggagagggagggagggaaagagagagagagagagagagagagaaagagaagtaagtaggtagaagttttaatgttttatgatttaattttggaaataaattatattgtgttattgttattatttttttttagaagtaagtagatagggttggtgaatatttattgagaggggaattagattttattttttgattgggggagtgttaaagaatttgtgaatatgtttttaaatgattatattttttttttttaaaatgtttgtttaaattggtgtatataaaaagttcgggggttagtgatttatttaaggttattaagttgttaaatggttttattaatattagatttaattttgtgattttaaattttatgtttttttttattattttagataattttcggtgaatattattgtttattagggtagttaagatattttagttgttaaatagatttagtttttttaattgtttcggataatatattttttattttgtagaaaataaatattatttatatggtagttatttataaatattttttaagtttattttaaatatttgtgttttaaatttttttttttaatagatgtatttatttgtatttttttagatgaattattttttttttgttgttgttgttatttttgattgtattttttattttttaagatttttttgtattattaagtttattgtttaagttaatattattttttaatttggggatttttttttgatttttgtgtgttttttttgtgggttattaatgtaatgttatttaagattaggatttggttgggcgtagtggtttacgtttgtaattttagtattgtgggaggtcgagtcgggaggattatttgaggttaggagtttaagattagtttgattaatatggtgaaattacgtttttattaaaaatataaaattagtcgggtatagttatatgtttgtaattttagttattgggtagtttgaggtaggagaatcgtttgaattcgggaggcggaggcggagtttgtagtgagttaagattttataattgtattttagtttgggttataagagcgaaaattcgttttaaaaaaaaaaaaaagattaggatttgatataaggtttgaggggtatttttttgttttgttttgttttgtttttaagaggttaaaatttttatagttgaaaatttttgttgaattatagagatttgaattaatttagtttagaaagtttggggatttgaataacggtatggatcggaaatttttttatttgttagtttttattattttaggtagtaaaatagatttttttttaggagttttttatcgtttggggttttttagtagtgggatgtggggaattaattttttttcgtttttatttaaatattaggtgggagtaaggggtgggaagtagagaaagtggatagaggtttttagtggatatgggatttttgtgtagattagtatagtttttagaaattttatgtaagtaatataggtattgttatattttttagtggttattttttaaaaagtaaataggtgaggtcgggcgcggtcgttacgtttgtaattttagtattttgggaggtttaggcgggcggattacgaggttaagagatggagattattttggtcgatacggtgaaatttcgtttttattaaaaatataaaaattagttgggtatggtgacgcgcgattgtagttttagttattggggaggtcgaggtaggagaattatttgaattttggaggtggaggttgttacgttttattatattttagtttggcgatagagtgagatttcgttttaaaaaaaagaaagtaaataggtgaaattaattttaataatatattttgtttaatttaacgtatttaaaatattattatttgaaagtgtaatgaatataaaaatatttatgagatattttttatttttatatttatattgttttggattttaatgtgtattttatatttatagtataattaatttgggattagttatattttagtttaataatagttaatagtatatgggatagcgtaaataaattttgcgtttttgttgtttttttgggtttcggagattttaattttttttttagattgtaaatttttttgtttttaagtttcggttttaatattagttcggtagaggaatttagtttaatgaggtacgttttttttttgttattttttattttattaatttgtttcgtggtaaacgtaggattgattttttaaaattattttattaattagtttatatatttattatttatttgttttattagaatgtaggttttcggaaggtagggatttaaaaaaatttgttttgttttatgtgatttttttatattaagtatcgtgttcggtataagttgggattttagtatatatttcgggacggaagaatcgtgtttttttagaatttagttagagggtagtttagtaatgtgttataggtggggcgttcgcgtttcgggcggacgtattggtttttcggtcggcgtgggtgtggggcgagtgggtgtgtgcggggtgtgcgcggtagagcgcgttagcgagttcggagcgcggagttgggaggagtagcgagcgtcgcgtagaattcgtagcgtcggtttggtagggtagttcggaggtgggtgggtcgcgtcgttagttcgtttgtagggtttttattggtcgtttgtcggtcgtttttcgtttaaaaggcggtaaggagtcgagaggttgtttcggagtgtgaggaggatagtcggatcgagttaacgtcggggattttgtttttttcgcggaggggattcggtaattcgtagcggtagggtttggggtcggcgtttgggagggatttgcgttttttatttattttttagttgtgttttcgtcgcgtttcggttagttttcggcgttggcgtttatggtcggttttcgatagcgtttcggagggatcgggggagtttttaggcgttcgggtgagtagttaggcgcggtttttcggttttttcgattttcggcgttagtttttgtttttttagttagggcgcggtggggtttgttcgggtagtgtttcgagtaattgggaaggttaaggcggagggaaatttggtttcggggagaagtgcgatcgtagtcgggaggtttttttagtttcgcgggtcgggtgagaataggtggcgtcggttcgattaggcgttttgtgtcggggcgcgaggatttggagcgaattgttgcgtttcggtgggtcgttttttttttttttttgttttttcgggcggtcgtacgtcgggtcggtcgggtaacggagagggagtcgttaggaatgtggttttggggattgtttcgttcggggaaggggagagggtggttacggtgttaggagaggcgcgggagtcgagaggtggcgcgggggtgttatcgttgtcgtaggttggagagagattgtttttagtgaggcgcgtatcgtttgggcgagggttttattttttcgcggcgtttttggaggtgggaaagttgggtgggtatgtgtgtagagaaaggggaggcggggaggttagttattttcggagtcggttttgattttaatagatcgtttagcgtttggggacgtcgatttcggggtgtcgtggtgttcggttttacgcgcgcgcggggttgaggggtcgggggcgtttttggtcgtttagttttaataaagggtgtttttttttatttcgcgaggaggggtagtttcggagattcggtttttagcgagcggggttttagcgtcggggaggtttatttttttttggggttgttattttattattattattgttttttttttttttttaaaagg

SEQ ID NO: 144 - DNA, 6090 bp, Artificial Sequence
  chemically treated genomic DNA (Homo sapiens)
ttttttgaagaaaaaaaaaaggtaataataatagtaaaatggtaattttaaaaggaagtagattttttcggcgttaagatttcgttcgttgaagatcgggttttcggagttgttttttttcgcggggtggagaggagtattttttgttaaagttgggcggttagggacgttttcgattttttagtttcgcgcgcgcgtggggtcgggtattacggtatttcgaggtcggcgtttttaaacgttgggcggtttgttgggattagaatcggtttcggaagtgattggttttttcgttttttttttttttgtatatatgtttatttagtttttttatttttagggacgtcgcggaagaatgaagttttcgtttagacggtacgcgttttattgggagtaatttttttttagtttgcggtaacggtggtattttcgcgttatttttcggttttcgcgttttttttaatatcgtggttatttttttttttttttcgagcgaggtagtttttagagttatatttttggcgatttttttttcgttattcggtcgattcggcgtgcggtcgttcgggggagtaagggagggaagggagcggtttatcgaggcgtagtagttcgttttagattttcgcgtttcgatataaagcgtttggtcgggtcggcgttatttgtttttattcggttcgcggggttggggaagtttttcggttgcgatcgtattttttttcgaagttaagttttttttcgttttggtttttttagttgttcgaggtattgttcggataaattttatcgcgttttggttgggaaagtaaaagttggcgtcgggggtcggggggatcggggagtcgcgtttggttatttattcgggcgtttgggagttttttcggttttttcggagcgttgtcggaggtcgattataggcgttagcgtcggagattagtcggggcgcggcgggaatatagttagggagtgagtggggggcgtagattttttttaggcgtcggttttagattttgtcgttgcgagttgtcgagtttttttcgcggagggaataaagttttcggcgttggttcggttcggttgttttttttatatttcgaagtagtttttcggttttttgtcgttttttgggcggagggcggtcggtaggcggttaatggggattttgtaagcgggttggcggcgcggtttatttattttcgagttgttttgttaggtcggcgttgcgggttttgcgcggcgttcgttgttttttttagtttcgcgtttcgggttcgttggcgcgttttatcgcgtatatttcgtatatatttattcgttttatatttacgtcggtcggggagttagtgcgttcgttcggaacgcgggcgttttatttgtgatatattgttaagttgttttttgattgggttttagggaaatacggttttttcgtttcgagatgtgtattgggattttagtttgtgtcgggtacggtgtttggtatgggaaaattatatagaataaaatagatttttttaaatttttgtttttcggaaatttgtattttggtgggatagatagataataaatatgtaagttaattaataaggtaattttggaggattagttttacgtttattacgaaataggttaatggaatagagaatggtaggaagggagcgtattttattagattgggtttttttgtcggattggtgttggagtcgaggtttgaaggtaagaaggtttgtaatttgaagaaagggttgaggttttcgagatttaaagaagtaatagagacgtagagtttatttgcgttattttatatgttattggttattgttgagttgaaatgtagttagttttaaattaattgtgttgtaagtgtaaaatatatattagagtttaagatagtatggatatgagaatgaaaaatattttatgaatatttttatatttattatatttttaaatgatagtattttggatacgttgggttaaataaaatatattattaaaattaattttatttgtttatttttttttttttgagacggagttttattttgtcgttaggttggagtgtagtggagcgtggtaatttttatttttagggtttaagtgatttttttgtttcggtttttttagtagttaggattatagtcgcgcgttattatgtttagttaatttttgtatttttagtagagacggggttttatcgtgtcgattaggatggtttttattttttgatttcgtgattcgttcgtttgggttttttaaagtgttgggattataggcgtgacgatcgcgttcggttttatttgtttattttttaaaaggtggttattagaaaatataatagtatttatgttgtttgtatgagatttttgaggattgtgttggtttatataaagattttatatttattggagatttttatttattttttttattttttattttttgtttttatttaatgtttgggtggagacgaagaagggttgattttttatattttattgttggagaattttaaacggtgaaaagtttttaaagggaaatttattttattgtttagaatgatgaaaattgatagatgaagagattttcgatttatatcgttgtttaaatttttaggttttttaaattgagttggtttaaatttttgtggtttaatagaaatttttaattgtgaagattttggttttttgaaaataaggtaaaataaaataaaagaatattttttaggttttatgttaaattttagttttttttttttttttgagacgggttttcgtttttgtggtttagattggagtgtagttgtgaaattttggtttattgtaaatttcgttttcgtttttcgggtttaagcgatttttttgttttaggttatttagtagttgggattataggtatgtgattatgttcggttaattttgtatttttagtagagacgtggttttattatgttggttaggttggttttgaatttttgattttaggtgattttttcggttcggttttttatagtgttgggattataggcgtgagttattgcgtttagttaaattttagttttaaataatattgtattaatgatttataggaagggtatataggaattaaggggaagtttttaaattgggagatggtattagtttaagtagtgggtttgataatataaaagggttttgagaggtgagaaatatagttaaaaataataataataataaaaaaagagtgatttatttgggaaaatgtaaatgaatatatttgttgggagaaaaaatttaaaatatagatgtttgggataaatttggaaggtgtttatggatgattgttatatgggtaatatttattttttgtaaaataaaaaatatattgttcgaggtaattaaaaggattgaatttatttggtagttagaatgttttaattattttaatggataatgatgtttatcggagattatttggagtagtgaaaaagagtatgaaatttggagttataaaattagatttagtattggtggaattatttaatagtttaataattttggatgagttattaattttcgagttttttgtgtatattaatttagataagtattttagaaaggggaaatgtggttatttaaaaatatatttataaattttttgatatttttttaattaagaggtggagtttaattttttttttaataaatatttattaattttatttgtttgtttttaagaaaaggtagtggtagtggtatagtgtaatttatttttaaggttaggttataaggtattagagtttttgtttgtttgtttttttttttttttttttttttttttttttttttttttttttttttttttttttttatttattttaaagtttttagttgttatgattattttagggttgttatgtagagatatgtgataaaattatagaaagaacgagagatgtttagagaagttagttgtttagttttatttttatttttagttgtttatattttttagtttaagttttgtgagtaaaattaatgatttttaatgttttaagttattattttagagtggtttgttatgtagtaatagattatttttttaaaaagaaaaattaagaaaattttttttttaatatatattaggttttagatagatgaaataatttttttaattaatttttaaataaattagcggggtttttatttaataaataaataaataaataagtggttatttttattttatatgtaaacgttttagttttattatttgtgaaatgaagatgattatagatttttatatattttttgggtttgttgggagaatttaaagagataatgtatgaaataggattttgtatattataaaatatattagaatgttggatattttattttttattatgtttttagtaaaaaggatttagagaggtattttatatatagaaggtaataatataagaagttataaattatgagatgttagttgagaaggatttttataaaaataattatgatatggattatggattataataatgatggcgataatattttaaataaattcgattgtagattttagaatattattttatagtcgtattagggtaaaataattattgttataagatttaataaattttagaggtttaatatattaaaaatgtgttatttgtttttagtataaaggtttgtagggtataagtagagattagttttatagtagttatttagaaatttaggtttttgttatttaatgaatttatgtttttttagcgtaagttttttagtttattttttttattttttggttgatgagagaagagataatatagggaggattgtattgaaggtttatgtaggaggttagatttgaagtttgagataattattttttggtaagatgtttttagtttaaagtggattatattattttatttttattttttggttgtttttttgtaatatggttttggttttattaagggttaatatttttaagaatgttttttattttgggaggtcgaggcgggtagattacgaggttaggagattaagagtattttagttaatacggtgaaattttatttttattaaaaatataaaaaattagttaggtgtggtggtaggtgtttgtagttttagttatttgggaggttgaggtaggagaatggggtgaattcgggaggcggagtttgtagtgagtcgagatggtgttattgtattttagtttgggtgatagagtaagatttcgttttaaaaaaaaaaaaaaaaaaaaaaaaaagaatgtttttgtattgtggttttattattaaagattttgttcgttacgtagttgagagtttttgatagaggtagttatatgattgattttagttttttttagtattgagtgttaaaagtatttatttttttttattaaattatatttttttttattagataaaagtatagagtttattttgttttttattttgttttggattcgttagaaagtatgcggtaagtttagaaagtataaatttttatttaatgtttaatttattattttttttgatttcgtttataagtattttttgagtatttagtgtttattaaatgttagggatatagatataagagaaatattttttgtttttaggtaatttagtttgatgagggagacggattaataaatagatttgcgattgtgttaaatataatttatttgttattttatatttaatttattttttgagtcgtaagattattttaatgtattttttgttttttggttgttggtaggtttagttaatggggtatttgatatgagatgaaggagaaggaaggagagtgaagttaagatagttatttttttgtttttttttttgtaagattgttatagtttatagttaaatataggttgttgttttttattaggtttcgttttttatcgggttttttttttttgggttttggtaattatttttttttttttgtttttttgagtttagggttggtgttagttttgttattattattttgggtttttgttttattttttatggtttttttgtattttttttatatttttttgaattgttttaatttgagtattttatttttg

SEQ ID NO: 145 - DNA, 3720 bp, Artificial Sequence
  chemically treated genomic DNA (Homo sapiens)
tgtagttgtttattaaaattttatatatattttggtatataattatattcgttggaatttattttatagatatatttatatttatatagttaaggatgttgattttaataatattggtataagtaaaaagttggaaattgtttatatgtttatggataggggataaatcgattaatttaaggtttttttttataatggagtattatatagttttgaaaaagaatgataagatttttatgttaggatatggtataatttttaagttattttaagtgaaaaaataataataataataatattgtagaataatgtgtatggttggatatatataaatttttttgaaagaatatttaagaaatttaaatgtggttattttaggagttaggaatgaggtaggtggagaggagggatttttattttttaatttagaatatattttgttgtgttagttgattttttttttattgttaataagtattatagttttttttaatttaaattattttttttagtataaatttaaaaaaaaaaaatttaaaatggaaaaatatataggcgtgagtaaaagaaatgaatggtaataatttttgtggtttattgagtgcgtttggatatttatgtgtttttagtttttttttataggaaatgtataggtgagaaattgacgttaagggggattgagtgttaagttagttagtggtagagggtagatttaaatttaatacggtttttttttgttgtttttcggtttttgtttttaggtgggaagcgtatttatcggacggtcggttcggtgaggcgtagcgttttagattggcgtattcgcggttttagcgttttacgtttggggagcgcgcgcgtacgtagcggcgcgagtttggcggcggcggcgataataataacgttatagttcgagttttttttttcggagttttcggtatatattttgtgtttatgtttgggtatttacgttacggcggtagggtcggggttttttaaaatggtagtggttcggggagtcggaagttcggagttagcgtcgtcgtagttatataagtgggggggttgtgggttgggggagttcggtagcgttttggagaggcgaggagtcgtcgttcgaggtcggtgcgggcgagcgagggcgtcgcggtttttcgattttttttttagaggtgagtgttcgaagttaggagttcggcgtttataggtttgtgcgttgcggggaatttttatcgttagttttttcgttattcgcgcgtttttaagtttagcgggcgaggtttcgggcgttttatagtcggcgtcgcgttatgttttattttagcgagtttttcgaattcgacgcgtttttcgttaagtttattgaaggttgttgcgtcgaatttagcgttgaattgtttcggttgtttgttagggacgttttcgcggttatcggttattttggaggtaaggagggcgagtaggggtgtttagacgacgacggcgtagcgcgggggcgtattatatttgagaattaggagggattgggatattggagttatgagaataggggcgatgggaagtttaggagttttggggtgcgtatttttatttttatttatattgggtcgttagcgttttcgtaggaatttgtgcggttatcggagcgtttttttgtttgtgtacgtgtgttttgcgtgtgtatgtttttatgtgttttttgggacgtatgcgggtttttgttgaattagaatgtgtaaaaggtattttgtgtatattcgtgggtattaagagttttgtaggtaggggttgtggatttaggtgtattttttgatgtgtttagagttgatttttgttttttttttagtaggcgattttttgagttgggttttgaatagttgcggcgtaagtggggatttagtcgatttttgttttttggaggggtttgcgtttatattttttttcggttttagttatagcggtagtttttttatttaggtagtgttcgaatattcgtacgattcggaggtattttttaattttatgtcgggcgttttaggtttggtattttttttcggtttagaggtagtagcgtttagattttcgttggatgtttttttttttgcggggttcgatgttttgttgtcgggttcgtcggatttttatttttcggatttgggcgttgttttttttttagaggcgttttgggaggtttcgttttgcgcgggtgttttttcgtagtgtttgtatgagttttagtttttttcgttcgacgttaagttcggttttcggcggtttttcgtttcgttagcgttggacgttgtttttgtttttaagggtttttacgcgttttgggagttgttttttgtgggggttttagggaattgtgggttatagggagattattaggtcgtttcggaggttcgttttttcgtaatagggattaagattgaggatttgttgtttattagttgttttgcggaattgtcggtcgttttagttaatagattttattttagcggggtttatgacgttttttcgttggtttcgggtgatttaggggagggggttgagggtttttttgggtttttgattttttttagtggggagggagggagtagcggcgacggcggagagtttttggttagtacgtagttttagtttttttcgttgggttttcgtagcgtcgtcgcggcggatttttttaaatttttggtggcggatatttttggaagtagtggcgtggttgtattattcgtgtcgtcgtcgtcgtttattttttttttttaggttaaggcgcgacgtaaggggcgtcgcggcggtaaatgtagtacgcgttgtttttgttcgcggtcgtacgttaaggttttcgtttgttcggtggagagttgtgtgcggagttttgcgcgtttcgacgagtttaatcgttatttgcgtatttatacgggttataaatttttttagtgtcgtatttgttttcgtaattttagtcgtagcgattattttattagttacgtgcgtatttatatcggcgagaagttttttgtttgcgacgtgtgcggtcgtcgtttcgcgcgtagcgatgagaagaaacggtatagtaaggtgtattttaagtagaaggcgcgcgtcgaggagcggtttaagggtttcggtttttattcgttgggtttttttttcgtttttttttgagtaagagatgggtttatgggttggggcgtcgtcgttcggcgcgtacgagtttcgggtcgttttttttttcgttttttttttaattttttttcgtacgttcgagggtcggttttcgtttcgtttttagtttttttgaagcgttcgtcgtatacgttttatttagtattagttcgtcggatagttttcgcggtttaggcgttgttatttttgttagtcgcgttttgggggaagttttttgagattatttagtgaataggtattattttgggatttaagatagttttttgtaattgtatacgttttacgtttttttttataatttttagagataggttggggtaggttaaggcggtttcgcgcgggattttgtatagtagtgttttatttagtagtcgattggatgtaacgttttgttttgggttttttttttttttgttgttgttaatttttgtaaagtagacgttatttttaagtagttgataaaattgtttatttttgtaattaaaattattgtgttaaaagtttattgaatttgttatgtaagttttt

SEQ ID NO: 146 - DNA, 3720 bp, Artificial Sequence
  chemically treated genomic DNA (Homo sapiens)
aggagtttatatggtagatttagtaagtttttagtataataattttaattgtaaaaataaatagttttgttaattgtttgagagtagcgtttgttttataaaaattaataataataaaaggaaaaaaaatttaaagtaaaacgttatatttaatcggttgttggataagatattgttgtataaagtttcgcgcgagatcgttttggtttgttttagtttgtttttgggggttatagaggaaggcgtggggcgtgtgtagttataaaagattgttttgaattttagggtagtgtttatttattgggtggttttagaagattttttttaaagcgcggttgataagggtgatagcgtttggatcgcgggaattgttcggcgagttggtgttgaatagggcgtgtgcggcgggcgttttaaggaaattggaagcgggacggaggtcggttttcgggcgtgcgaggaggagttggaagaagagcggggaggggaacggttcggaattcgtgcgcgtcgaacggcggcgttttaatttataaatttattttttgtttagagagaagcgaaggagaggtttagcgagtaaaagtcgaggtttttgagtcgtttttcggcgcgcgttttttgtttgaggtgtattttgttgtgtcgtttttttttatcgttgcgcgcgaagcggcggtcgtatacgtcgtaagtaaaaggtttttcgtcggtgtgggtgcgtacgtggttggtgaggtggtcgttgcggttgaagttgcggaggtagatgcggtattggaagggtttgtggttcgtgtggatgcgtaggtggcgattgagttcgtcggagcgcgtaaagtttcgtatataattttttatcgggtaagcgaaggttttggcgtgcggtcgcgggtagaagtagcgcgtgttgtatttgtcgtcgcggcgttttttgcgtcgcgttttggtttgggggaaaggggtgggcggcggcggcggtacgggtggtgtagttacgttattgtttttagggatgttcgttattagaggtttagggaagttcgtcgcggcggcgttgcgaaggtttagcggggaaagttgaggttgcgtattggttagaaatttttcgtcgtcgtcgttattttttttttttttattaggaggggttaggagtttagggaggtttttagtttttttttttaagttattcggggttagcgggaaagcgttataggtttcgttgggatagagtttgttggttgggacggtcggtagtttcgtagggtagttgatggatagtaagtttttaattttggtttttattacgggaaaacgagttttcggggcggtttggtagtttttttgtgatttatagttttttggggtttttatagaaagtagtttttagggcgcgtagggatttttgaaggtagagatagcgtttagcgttggcgaggcgggaggtcgtcggaggtcgggtttgacgtcgggcggggagagttgaggtttatataggtattgcgagggggtattcgcgtaaggcgaggttttttagaacgtttttgggaaaggggtagcgtttagattcggggagtaaaggttcggcggattcggtagtaaggtatcggatttcgtaggaaaaggggtatttagcggggatttggacgttgttgtttttggatcggggaagggtgttaggtttaagacgttcgatatgaggttgaagagtgttttcgggtcgtgcgggtgttcgggtattgtttgaatgaagaagttatcgttgtagttgaggtcgggagggggtgtgggcgtaggtttttttaggaagtaggagtcggttaagtttttatttgcgtcgtagttgtttaaagtttagtttaagaagtcgtttgttgaggagggagtaggaattagttttgggtatattaaagggtgtatttgagtttatagtttttatttataaaatttttggtgtttacggatatatataaagtgttttttgtatattttgatttagtaggggttcgtatacgttttaaggagtatatagaaatatgtatacgtaaaatatacgtgtataggtaaaagggcgtttcgataatcgtataggtttttgcggaggcgttggcggtttagtgtgggtgggaatgggggtgcgtattttaggatttttaagttttttatcgtttttatttttatagttttaatgttttagttttttttggtttttaggtatggtgcgttttcgcgttgcgtcgtcgtcgtttgagtatttttgttcgttttttttatttttagggtagtcggtggtcgcgggagcgtttttggtaggtagtcggggtaatttagcgttgggttcggcgtaatagtttttagtggatttgacgaggagcgcgtcgggttcggaaaattcgttaaggtggagtatggcgcggcgtcggttgtggggcgttcggggtttcgttcgttgggtttgggggcgcgcgggtggcggggaggttggcggtaggggtttttcgtagcgtatagatttatgggcgtcgggtttttggtttcgggtatttatttttgggaaaggagtcggggagtcgcggcgttttcgttcgttcgtatcggtttcgggcggcggtttttcgtttttttaaagcgttgtcgggtttttttagtttatagtttttttatttatatagttgcggcggcgttggtttcgggttttcgatttttcgggttattgttattttgggaggtttcggttttgtcgtcgtgacgtaaatgtttaaatatggatataggatgtgtgtcggggatttcgaaaaggaaagttcgagttgtgacgttgttgttgtcgtcgtcgtcgttaggttcgcgtcgttgcgtgcgcgcgcgttttttaggcgtggagcgttggggtcgcggatgcgttagtttggggcgttgcgttttatcgggtcgatcgttcggtagatgcgttttttatttggaggtagaggtcgaggggtagtaggggaggatcgtgttgggtttgaatttgttttttgttattaattagtttgatatttagttttttttaacgttagttttttatttgtgtattttttgtggagagaaattgagagtatataaatgtttaggcgtatttagtaaattatagagattattgttatttattttttttgtttacgtttgtgtgtttttttattttaagttttttttttttaaatttgtgttaggaaaaataatttaaattaaaaaggattgtaatatttgttaatagtaggaggaaagttaattagtataatagggtatattttaaattgaaaagtaaaagttttttttttttatttattttatttttagtttttgaggtagttatatttaagttttttgggtatttttttagaagaatttatgtatatttaattatatatattgttttgtaatattattattattattatttttttatttgaaataatttagagattgtgttatgttttgatataaagattttgttatttttttttaaggttgtatagtattttattgtaagggaggattttgagttagtcgatttattttttatttatgagtatgtaggtagtttttaattttttatttatattaatgttgttggagttaatatttttgattatataaatgtgaatgtgtttgtgagataaattttaacgagtgtaattgtgtgttaaagtatatgtaaaattttgatagataattgta

SEQ ID NO: 147 - DNA, 11147 bp, Artificial Sequence
  chemically treated genomic DNA (Homo sapiens)
gtggaatatattttttatatagttatattatttaaaatttattgtttttaagtttttatttaaatgttttttcgtgaagttatttttgagttttttttaaaattgtagttttttatttttgtattttttattgttttttatttttaatttttgttattgtagttagaattatttgatatatagtttttattttattggttttttgttatgtttttttttataagaatttgaagtttattaggtcgggagttttgtttgttgtgtttgttgttattttttagtgtttaaaattgtttggtatatagtaggtatttaataatttttgaattagtgaaaattagatggtggtttggtatttttatataggaatgagttaggtggaaattatttaggatataagtagattttgaagtgataaggaagggttattataattatgtggggtttattttgtttttttttgttttttttttttaggtttagtaatagttttattaaggattttatgaatattaaagtttatatttatatgttgttagaggtgagagtagtttattttattattagattttgtgtttagggtggtgatttgaagaaggaagagagcgaaagaagggaaggattatttttttttttaaattggagttaagggagggaggttagagtaagtttgggggcgtaatttagatttagtttttgtttaattttttttgtttttttttttaggggtttagagaattataaggtttgtagaattttttagagaagttttattattgattttttttttttatttttagatattaaagagtttgaatgtttttgagttatatggtttttttttttttttataaattttgttagttgttacgggggtttgtttttagggtataaagttattgagagatttagagatttagtttttttgtggaatttttaaaatgttttagtagttttgtttttagtttgttgtttggtagtatttgttagttgattttatgtattgtttttttttttgttattttggtaatttgggttttttattttatttttttttttatttttttttttagacgttattttttgaattgttatagagaatgggttaatttatggtggaggtttgtttatttttataataattaaagggttttaaggtttacgtttttatatatttaattattttttaggtattttaaattatatttaaattttaatttagttttattttgttttagtttttgtttgtaagtgttttagtttttaatgggtatagatttggatttcgttttttttagtcgggtttttattttaggttgagtttagttatcgttaattaatgtagagttaggttttttttttttttaattttggtcgtagtttaattttgttttttgaaagtatttcgtttttgttatttaatgttttttcgtgtgtttgatagttattttgtttttttattttcgttgtgttttaaattcgtttttatttagttttatggttttgtttaatcgtagagttgttttgttcgtttacgcggagtttagttcgatttattttcgtcggttgttacgtttatttttatataagttttgttttcgttgagtagtatggcgtgcgatatcgtttttttggtgttttggtaggggtttagaagtttttcgttcgttaattagagaaaaatagggttatttattttcgtttttgggggttgttttttattaattttatgtaagttaattagtgtgaggtagattttcgttttttcgatataggtttcgagtttttttagttgtttatagttcgttagtttttgagttaatcggcgtggagtatcgtgaaggtcgaacgcgttttttcgggattttaggggtcgtgagcgttttattatttttttttacgttaattacggtatagttttgtagggaagggttcgttttttaatttttcgaggttttgcggtcgattaatagcgttttggttaattagcgagcggcgggatattgggtttttttttttcgggtttacgtgagttgtagggaaacgtaggggcggtttttaggtgttgtcgtcgttatcgttattattatttttatcgtcgtttcggaatttaggtttggggggcggtggggtcgcgtatggagttttcgtttttcggagttgttaatattgttaacgttatcgttacgttatatataggtgagttttgggtttggagggtggagggtttagttcgtgattttacgtatttttttcgttttcgcgtagaggatgtggtttggtcggtggtttgttggtgttcgatttttcgtcgttattattacggttggtggatttgcgtgtggtattgtttaagtttttcgttttttatagtggatttgatcgtggtttaatttttttttttcgttgtataatggatcggtttgcgtgtttatgtttttttttacgttaatttagggtggattcgtttataggttttttttttatttttatttttattcgttttttatttatttttatttatagggagttagtttgtgatagtgtttagtttttttaatagtaggtgtatttgagtgtttggattttttttagttttaatttttaggagattcgttcgtggttttatttattttattttttttgtatatcgtagcgaattaattcgtggcgtcgtattttttcgtatttttttttaatagtgagtttatttgagtttgtatttttgttttttttagttttttaatgtattagtttatggttttttttaaaattattttttttttttattattattattattattttatagtggattagtttttatgtttggatttacgtttttttagttattagtttattgttttgttttttttttttcgtagattgtcgttttagcgtttggggtttttttttttttaatagtgggttagtttagtgttttatatttttttatttttagtagtttagtttatagttttttttttttttgttttgaattagtttgtgtgatggtttttttttttttttattgtggtgtaggagtttgtaaggttttttgttttttttttttttagacgatgagttttattatttttttttttgtagtggatttgtttattggttttttttttttatatttttgtatgtttgtatagtttttcgtatattttttcgtgagtttagtgttttgtaattgggggaagatcggtcgtgtatttttaatttttttttttttttttttttttttttagaagagaacgtgttgatttttttttttttgtgatggagtattgtacggttttttttgttttttattttttaatagtgggttagtttggttatattcgtaattataaagacgttttgttttattataataagtgaatatattagcgttagtgatgatagtaatgttaataggagttagcgtttattgagtatttgtcgtatattaggtagagtgttttatatgaatgagtttttttaatttttattataattttatgagataggtagtgagggaattgggttatagggaggttaaattttttatttaaaggtggtttaggaagtatttaggatataggataatttttgaggttttttttttagattttattttattttacgtgaggttttagtttttaaaaattaaattagtttttatttttaagtttttgtttttgttgttttttttgtttgtagagtagtttttattttttatttttttttagtatttatttattttttaattttagtagttgtgtgattttagatgagtgatttaattattttttttttgtgtttttttttttatttgtgaaatgggggattagaattagaattttttttagtgtaaataaatattaattgtgaattaatggtaaaataagtaatttttttagtattatcgtttatatttttttatttttttattgtgttttaattatattggttttattatatagttttttaaatatagtaggtatgggttagttttagggtttttgtattggttgttttttgtgttttgaatattatttttagatttttgtatggttttttttagtattttgtttaaatattaatttttaaaggatgtttattatattgtggtgtgtggaatgtagtataaaaagatatatgtatgaaagatgtttttaagaatgttagtttatatatgagtaagggttttttttttttttaaaaggatgtgtttataagattgaggtacgtaatatgttttgtaaaggtataggtataaaagttgtttttaagagtgttagttgtatatgtgaataaggattgtgttgttgtattgaaagaatgtgtttataaaattgtggtgtgtagttgggtataggggtgtgtatttatagttttagttattcgggaggttgaggtgggaggatagtttgagtttaggagttttaggttagtttgggtaatatagcgagatttttttttttgaaaaaaaaaaatttaaaaaataattattgtggtgtgtgtaatatatttttttaaaggtataggcgtaaaagatgtttttaagagtgatttgattttgttgtatttgggtagtgttattttattaaaggttgattgttatattatggtatttagaatatattatataaaggtatatgtataaaaaagaagtttttaataatgttatttgtaaaaataaaaaaagttaatttttttttgattatttgaagttgtatatttagtagggtttaagttaggtttttgatttgtttcgttgttttttattattgtttgatatattgtgtgggttatttgtttgttgtttgtttttttttattagaatgtgagttttatgaggatttagtttttgtttgtttatttatcgttatgtttttagtaattgaaaatgtattaggtaaatagtagatgtttaataagaatttattttatgaataaatgggaaaaagataatttgagatattagtgtaggggttatatgaggaagaagaagggatatgagagttaattagttgggattgtttttgtaattaatttttattgagttttttgtgagtattaggtatttttttaggtgttggaatatggtaaggaacgaaatagggcgaaatatttgtgtttgtggagttgatatttattaaaagttggggaggttgggtacggtggttaatattagtaattttagtattttgggaggttgaggtgggtggattgtttgagtttaggagtttaagattagtttgggtattacggtgaaattttatttttattaaaatataaaaaaattagttgggtgtggcggcgtgcgtttgtaattttagttatttgggaggttgaggtaggagaattgtttgaatttaggaggcggaggttgtagtgagttaagattgtattatgtattttagtatgggtgatagagcgagattttgttttaaaaaaaaaaaaaaaaaaatttaagttggggagatagattatgtgaataaaataaataagtaaaattagtataatagataaatgttgagaagaaataatgaaatagggtaggtaggaatcgagtattgggggtggttgaaattttaggtatagggaaggtgatttttgaattagggttttacggtagagacggagagagttttaatgtttacgggaagagtatattaggtagaaggaagtgttagtttagaggttttgaggtgggatggtgtttgttatgtttaaggaatattaaggcggttagtgtggttggagtagagtgcggggaagggtagaaggtgaggttatataggtgatgggagttagatagtgtaggtgatatataggataggattgtaggggtagggggagaaggatgatatattagttaatagttaatatttgtggagtatttgttatatattagaggtatttttttgtttaaatattaatttttaaaggatgtttattatacggtggtgtttggaatgtattataaaaagatatatgtgttaaagatatttttaagaatgttagtttatatatgaataaggattttttttttttttaaaaggatatgtttataaaattgaggtatgtaatatgttttatggaggtataggtataaaagttgtttttaagagtgttagttgtatatgtgaataaggattgtgttgttgtattgaaagaatgtgtttataaaattgtggtgtatagttgggtatagaggttgaggtgggaggattatttgagtttaggagttttaggttagtttgtgtaatatagtgagattttcgttttcgaaaaaaaatttaaaaaataattattgtggtgtgtataatatatttttttaaaggtataggtataaaagatgtttttaagagtgatttgattttttggtatttgggtagtgttattttagtaaatatttattgttaaatattatggtgtttggaatatattatataaaggtatatgtataaaaaagaagtttttaataatgttatttgtaaaaataaaaaaaaaagttaattttttaagttttttatagaagtattttatagaattgatatagttaatttttatagaagttttggagggtaggtgtatttttgagaatatttgattttgagagtaaaatatttttattttatagatgaggaaataagtaaagagaggttgagtaatttgtttagggtaattttgagttagaatagttagaataggggtagaggaatataaggttgaagatttagaaagaagaatagatttgtaagggtaggtaggttatttggtatttttgattacgtagaggaagaatgaattttttttggaatgcgatgattgtgtaattgagtttatgaagtgagggaagagttttttttgcggggagagtagttcgtgtttatttttagaggttggaattgtttcgggaacggtagatagtttagggtggttgttttagagtttttgtatacgtcgttcgtttcgtttgaaggtttttttttatagagggtagtttggtttgttatttttttttttttaggttaggtgttatttttttggggaagaattttttgtatattttgtgtaaaaatagtatttttgttattttttaggattttatttttttttgtttttttttatggagaattggtggtgtaaggcgattgtttattagagttaaattatttaggttttgaatttcggttttgttaatttttagttgtgtgatttggggtaggttatttttttgtatttttattgttttatgtggaaaatgggggaaatgataatttttattttttaacggtggtttgaggatttaatgagttaaatgatttaaagagtgtgtagtttacggtaaggatcgtatgtttggtttgtatttttaaattattaaaatgtatttatagtatattcgtagatgtttgataggtttttgaaattgattatttttaaaattggtgtgattttttttaaaatttatttttttgtaaggtttttattttagttgattataatgttgtttttgtgggtgattaggttataaatttagatttattttggattttttttttatttttttcgggtatgttatttgttagtaagttttattttgtgtttaggttttttttagattttagttatttttcgttagttttattgttattattattatttatcgtagtggtttttttagttttaatagtttgttttttttataatcgttagggggattttgttgaaattttagttatagtttgttatttttttgtttataatttttttgtggtttttgttttatttaatattttgatagtattcgaaaaagtttggtttagtttggttttcgttattttgtttttttttttcgttgttttttttttttttttcgaatttatgttagttttttttttttatgttatttgttaggtattttttagttttgggttttttatatcggttgtcgtttttatttggtttgttgtttttagatatttacgagtttagtttttttatttttttttggtttttgtttagttgttttttttttggcgattatttttttttgattttttatgtaaaagtaatagtttttttttgtttgattttttttttataatttttattattatttgacgtatttttgtatatgtttgtttttttttttatttgttttttttgttaagatgtgagtttttttggagtagggattgttgtttgttgcgttttcgattgtattcgtagtatttggtttatagtatgtatttattaaatgtttgttaagtgaaggagatggaaagaagtaaatatatttaagtaaggtagattattagaatttttatgaggggttaagtgggagaaataataaaatataaagttttgtgtgttgttgaagttggaagtttatcgttattttttatttagttgataggttttgttgtagttgaaagaagaattggtaaaattgtttgtttttgttattaggagttattttgaattttttggatttttgaaataagtttgtttgtaaaataaatttagtgaggtttttggtgataggattttttaatcggatattttatggttttgtgatttgtataattgaataggaagtttatgtttatttttagtttgtttttaggaaagaaagtagtaatggggtgatagggaggattttgttttttgaaggatatgttgagagggaatagtcggtgtgaggggtcgtttagtttaatggtgaaatgtttagttaattggaatttgattgtttggttttaaatgttggttttgttatatgtggtttgtggaaggtacgtagatatttgtgttttcgttgttttatttataagttaatgataggaagattatttattttttagaggtatgattagggataaataagttaatgtttattaaaaaaaaaaataatagtataggtgtatatgtttttatttaaaatttttggggttagatgtgttttagaatttttatttttttatattttagaaaggtaatatgatgtatatacgatgttatataatattttttagtaagttttgtaatcggttgtgtttatatttttgtagtaaaatgtatgaatattcgtaataagtgagatttaataaagattagaaagggttttgttttattttaaattaggttttgttattaaaagagttaaaagaagttttttgtttttagagtattttggatgttggaatggtagataagggattatgaataaattagaaattaatatttagagtttattatatattttaggtatataatatttaatttgtataatatttttgtgaattaggtattgttatttttattttattaatgggtatattattatttttgttttatatatgagaaaattgaggtataaagaggttaaagaatattagttaagcgtggtgttttatgtttgtaattttagtattttaggaggttagggagagaggattgtttgagtttaggagtttaagaatagtttgggtaatatagtgagattttattttttaaaaaaagaaaaagaatatgtttagggttatatagttaataagtggtagaattaggatttaaatattggtaatttggttttagtgtttgggtagttgtttagtaggttatattgtttttttgtttagaagagtgtttgatgtgtattaagtttttaatagatgttaattattgttgttattaagaaagagaatatttagggtcgagtacggtattttatatttgtaattttagtattttgggaagttaaggtgggaggtgggtggattatttgaggttaggagtttaagattagtttggttaatatggtgaaattatgtttttattaaaaatataaaaattagtcgggcgtggtcgtgggtatttgtaattttagttatgcgggaggttgaggtatgagaatcgtttgaatttgggaggtagaggttgtagtgagttaagattgtgttattatattgcgttttagtttgggtaatagagagagattttattttaaaaaaaaagaaaaaaaaaaaaagaacgagaatatttagggatagtaataggatagagagattaggtatttatttagttttaggacggttttataaaggaaaggatttttgggttgggatttgaaagataagaaagattgttaggcgaaagaaggaagttttacgtggagtgagtagtttttgtaagggtttggtaaaaaaaaaattttttgaaaaatttgatattgatatggtagaagatatagataatatttaaatgaggaggatggaattagttttttatttttgttgtaataaataattataaatttagttgtttaaaataatatatttgttattttatagttttgtaggttagaagttttatattggttttagttgaaattaaggtattggtagggttgcgttttttttggaggttttaggggaaaatttattttttgtttatttaagttgttggtagaatttaattttttgagattgtaggattgaagtttttgtttttttattgtttgttagttgatagttatttttagttttaagaggttgtttatagtttttgattttgagttttttttttttatttttaaagttaataatggtaggttgagttttttttatattttgaattttttttgttttttttgttattatatttttgagttatttttttttttttattatttgttttttagagtttatatgattagattgaattttattaaataatttagaaataatttttttgttttagggtttgtaattttaattttatttgtaaagtttttttttgttatgtagtgtaaataatatataggtttcgaggattaggatgcggagtagggttggtattatttggtttattatagtttgttttttgatttttatagatttatatttgttttatatttaaaatatatttatattattttaagatatttatgagttgtattttattatagggagtattttaagtaagattggggagttagaagttagtttgggaaggtttagggaatgatggtagggtttgaagatagagatggagaaaagatgataaaaaaaggaatttttttttcgttgatttttgttttttttatgtttatagttttttaatttagttgtttgttttttagg

SEQ ID NO: 148 - DNA, 11147 bp, Artificial Sequence
  chemically treated genomic DNA (Homo sapiens)
tttggagagtaaatagttgagttgagaggttgtggatataggaggggtagaggttagcgggaggaggatttttttttttgttattttttttttatttttgtttttaaattttattattattttttaaatttttttagattaatttttagttttttagttttgtttgggatgttttttgtgatgggatataatttatgggtattttaggatggtgtgaatgtattttgaatgtgaaataaatgtgaatttgtgggggttagagggtagattgtggtaggttaaatgatgttaattttgtttcgtattttaattttcggaatttgtatgttatttatattatatagtagaaaggaattttgtagatgaaattaaggttataaattttaagatagggagattatttttggattatttgatgaaatttaatttaattatatgagttttgaaaagtagatgatggagaaagaaaggtagtttagagatgtgatgatagaagaggtaggggagatttaaaatgtgagagggatttaatttgttattgttggttttgaagatggaggaaggaggtttagaattaaggattgtgggtagttttttaaagttgggaatggttgttagttgatagatagtaaggaaatagggattttagttttataattttaaggaattggattttgttaataatttgaatgagtaggaaatggatttttttttagagtttttagaaggaacgtaattttgttaatattttgattttagttgagattagtgtgggatttttgatttatagaattgtaagataataaatgtgttgttttaagtagttaaatttgtgattatttgttatagtaagaatagaaaattagttttattttttttatttgaatattatttgtattttttattatattaatgttaagttttttaggaggttttttttttgttagatttttgtaaaggttgtttattttacgtggggtttttttttttcgtttagtagttttttttattttttaagttttagtttaaaggtttttttttttatgaagtcgttttaaaattgaatgaatgtttgatttttttgttttgttattgtttttgaatgttttcgttttttttttttttttttttttttttgagatggagtttttttttgttgtttaggttggagcgtagtatagtggtataattttgatttattgtaatttttgttttttaggtttaagcgatttttatgttttagtttttcgtatagttgggattataggtatttacgattacgttcggttaatttttgtatttttagtagagatatggttttattatgttggttagattggttttgaatttttgattttaagtgatttatttattttttattttggttttttaaagtgttaggattataggtgtgagatatcgtgttcggttttgaatatttttttttttgatgatagtaataattaatatttattgagagtttaatatatattaggtatttttttaagtagagaggtaatatggtttgttggataattgtttaggtattagggttagattgttagtgtttgaattttggttttgttatttattagttgtgtgattttgggtatattttttttttttttttaagaaatggggttttattatgttgtttaggttgtttttgaatttttgggtttaagtaattttttttttttggttttttaaagtgttaggattataggtatgaggtattacgtttggttgatattttttaatttttttgtattttaatttttttatgtgtaaaatagggataatgatatgtttattagtaaaatggggataataatatttagtttatagagatattgtatagattaaatattatatgtttgaggtgtatgataagttttaaatattagtttttgatttgtttatagttttttatttgttattttaatatttaaaatgttttaagggtagaaagttttttttaatttttttggtggtaaaatttgatttgaaatgaaataaggttttttttggtttttattgaattttatttattgcgagtgtttatatattttgttgtagaaatatgaatatagtcgattatagagtttattaaggggtgttatgtaatatcgtatatgtattatgttatttttttgaaatgtgaagaaatggaaattttgaaatatatttggttttaggggttttgggtaagggtatgtatatttgtattgttatttttttttttaatgggtattgatttatttatttttgattatgtttttgagaagtaggtagtttttttgttattaatttataaatgaggtagcggaggtataaatgtttacgtattttttataggttatatgtggtaaagttagtatttggagttaggtagttaggttttagttgattaagtattttattattaggttaaacggttttttatatcgattatttttttttagtatgttttttaaagaataggattttttttgttattttattattgtttttttttttgagagtaaattggaaataaatatgagttttttgtttaattatataagttataaagttatgaagtgttcgattagagagttttgttattagagattttattgaatttgttttgtaggtaggtttgttttagaagtttaaagagtttagagtgatttttggtggtaaagataggtaattttattagttttttttttagttgtaatagaatttattagttgagtgaaaggtgacggtgggtttttagttttaatagtatatagggttttgtattttgttattttttttatttgattttttataagagttttagtaatttgttttgtttagatatgtttatttttttttattttttttatttagtaagtatttggtgagtgtatattgtgggttaggtgttgcggatatagtcgagaacgtaatagataataatttttgttttagaggagtttatattttagtaggaaaggtagatgagaaaaaaggtaaatatgtataagagtgcgttagatggtggtaagggttatgggaaaaaaattaagtaggggagagttgttatttttatatggagagttaggggagagtagtcgttaaggaggggataattgggtagagattaaaaggaggtgaaggaattgagttcgtgagtatttgagagtagtaagttaggtggaagcggtagtcggtgtgaagggtttaaggttggagagtgtttggtaggtgatatggggagaggaggttgatatgggttcgggggagaggagggaggtagcgggagaggagaatagagtgacgggggttagattgagttaggttttttcgggtgttgttaggatgttgagtgagataggagttataagagggttgtgaatagagggatgataggttgtgattgagattttaataggatttttttggcggttgtgagaagaatagattgttggggttgaagaagttattgcggtagatgatggtggtagtagtggggttggcgagaagtagttggggtttggagaaagtttgaatatagaataggatttgttgatagatagtatgttcgggggaggtgagagaagggtttagggtgagtttaggtttgtggtttaattatttataaagatagtattgtggttagttgaggtgggagttttgtaggagagtaagttttgaggggggttatattagttttggagatggttagttttagaggtttgttagatatttacgggtatgttatgaatatattttaataatttaaaaatgtaagttaggtatacgatttttatcgtgggttgtatattttttgaattatttaatttattgaatttttaaattatcgttaaagggtggggattattattttttttattttttatatgaggtaatggaggtatagagaagtaatttgttttaagttatatagttggaagttggtagagtcggaatttaaaatttaagtggtttggttttagtgagtaatcgttttatattattagttttttatgaagagaaatagagaagggtaagattttagagagtgataggaatgttgtttttatatagggtgtataaggagtttttttttaaggaagtgatatttggtttgaaggaggggaggtagtaagttaggttgttttttgtgggggagggtttttaggcggagcgaacggcgtgtataaaggttttgaggtagttattttgaattatttatcgttttcgagatagttttaatttttgagggtaagtacgggttgtttttttcgtagggagagttttttttttattttatggatttaattatataattatcgtattttaggaagaatttattttttttttgcgtgattaaaggtgttaaataatttgtttgtttttgtaaatttgtttttttttttgagtttttagttttatgtttttttgtttttgttttggttattttggtttaaggttattttgagtaagttatttagtttttttttgtttgtttttttatttgtaaaatggggatattttatttttaaagttaaatatttttaaaagtatatttattttttaaggtttttgtgaggattaattgtgttaattttgtaaaatatttttgtaaaagatttgaggggttgatttttttttttgtttttataagtagtattgttaggaattttttttttatatatgtgtttttgtatagtatattttaagtattatagtgtttaataatgaatatttattgaaataatattatttaggtgttagaaaattaaattatttttagaaatattttttatgtttgtgtttttaggagagtgtattatgtatattatagtggttattttttgggttttttttcggagacggggattttattatgttgtataggttggtttggaatttttgggtttaagtgatttttttattttagtttttgtgtttagttatatattatagttttgtgaatatatttttttaatgtaataatatagtttttatttatatatataattagtatttttagaaatagtttttatatttgtgtttttatagagtatattatatattttagttttgtgaatatatttttttgaaaaggaggaaaatttttatttatatataaattggtatttttagaaatatttttgatatatgtatttttttgtagtgtattttaggtattatcgtgtggtaaatattttttgggggttggtatttgaatagaaaagtgtttttgatgtgtggtagatattttatagatattagttattagttagtgtgttatttttttttttttgtttttgtaattttattttatgtattatttgtattatttggtttttattatttgtgtgattttattttttattttttttcgtattttgttttagttatattggtcgttttgatgttttttgaatatggtaggtattattttattttagggtttttgaattggtatttttttttgtttggtatgtttttttcgtagatattaaggtttttttcgtttttatcgtgaggttttaatttaagagttattttttttatgtttaagattttaattatttttaatattcgatttttatttgttttattttattatttttttttagtatttgtttattatgttaattttatttatttattttgtttatatagtttgtttttttagtttgggtttttttttttttttttttgagatagagtttcgttttgttatttatgttggagtgtatggtgtaattttggtttattgtaattttcgttttttgggtttaagtaatttttttgttttagttttttaagtaattgggattataggcgtacgtcgttatatttagttaatttttttgtattttagtagagatggggttttatcgtgatgtttaggttggttttgaatttttgagtttaggtaatttatttattttagttttttaaagtgttaggattattggtgttagttatcgtgtttagtttttttaatttttaataaatgttagttttataagtataaatatttcgttttgtttcgttttttgttatattttagtatttagaagagtgtttggtatttataaggggtttagtaaaggttggttgtaggaatagttttaattaattagtttttatattttttttttttttttatgtgatttttatattggtgttttaaattattttttttttatttatttatgggataaatttttattgagtatttgttgtttatttggtatatttttagttgttggagatatagcggtgaatgagtagataaaaattgagtttttatgggatttatattttaatgaggagagatagataataaataagtaatttatatagtgtgttagatagtgataaagggtaacgggataaattagggatttggtttgagttttgttgggtgtgtagttttagatggttagggaggggttgattttttttgtttttataagtagtattgttaggaattttttttttatatatgtgtttttgtatagtatattttaagtattatggtgtgataattaatttttaatgaaataatattatttaggtataataaaattaaattatttttagaaatattttttacgtttgtgtttttaagagagtgtattatatatattatagtggttgttttttgggttttttttttttagaaaaagggatttcgttatattgtttaggttggtttggaatttttgggtttaagttatttttttattttagtttttcgagtagttgggattataagtgtatatttttgtgtttagttatatattatagttttgtgaatatatttttttaatgtaataatatagtttttatttatatatataattagtatttttagaaatagtttttatatttatgtttttatagagtatattacgtattttagttttgtgaatatatttttttgaaaaggaggaaaatttttatttatatataaattggtatttttagaaatattttttatatatgtatttttttatattgtattttatatattatagtgtggtaaatattttttgggggttggtatttgaatagagtgttgaaaggaattatgtagagatttgggggtggtgtttaaggtataaagaatagttaatgtaaaggttttgaggttggtttatgtttgttatgtttgaggagttgtgtggtggaattagtgtggttggagtatagtaagggggtgggaaggtataggcggtaatgttagaaaggttatttgttttattattaatttatagttaatatttatttatattggaagggattttagttttgattttttattttataaatgaagaaaaaggtatagagaggaagtggttaaattatttatttaaggttatatagttgttgggattggggggtgggtgggtgttgagagaaggtgaggaatgaagattgttttgtaggtagagggaatagtaagaataaaagtttggaggtgagaattaatttggtttttaaggattgaggttttacgtggggtgggatgagatttaagaggggagttttaaaaattattttgtgttttgagtattttttgggttatttttgagtaaggaatttaatttttttatggtttaatttttttattatttattttatggggttgtggtgaggattaaaggaatttatttatatgaaatattttgtttgatatacggtaggtgtttaataaacgttagtttttattggtattattattattattggcgttaatgtatttatttattgtagtgaggtagaacgtttttgtggttacgagtgtgattaggttgatttattattaagaggtggaggatagggaaggtcgtatagtgttttattataaggaaaagaggattagtacgtttttttttgggaagggaaaaaaaaagagaaggaaattgaaagtatacggtcgatttttttttaattataaagtattggatttacgggagggtatgcgggggattgtgtaagtatataggggtgtgggggaggaaggttaatgaatagatttattgtaaagggaggggtgatgaggtttatcgtttgaggggaaggggagtagaaaattttatagatttttgtattatagtgagaggagagaaaagttattatatagattgatttaaagtagagagggaaaaggttatggattgagttattgaaaatagggagatgtaaagtattaaattaatttattattaaaaaggagagaattttaagcgttagagcgatagtttacgaaaaagaggagatagggtaatggattgatagttaaagggacgtgaatttaaatatgaagattgatttattataaaatggtggtggtggtggtggggggggggggtggttttgaaaaaagttatggattgatgtattgggggattggaggaggtaggaatataaatttaggtagatttattgttaaagagggatgcggaggagtgcggcgttacggattgattcgttacgatgtataggaagggtggaataaataaggttacggacgggttttttgaaagttgaggttaggagaaatttaaatatttagatatatttattattaagggggttgaatattgttataggttagttttttataagtgggggtgggtggggggcgggtgggggtaggggtagggggaaagtttatggacgagtttattttaagttggcgtggggaaaaatataagtacgtagatcgatttattatataacgggagggggaggttaggttacggttagatttattataagggacgaagggtttgagtaatgttatacgtaggtttattagtcgtggtggtggcggcggggagtcgaatattagtaggttatcggttaagttatattttttgcgcgggggcgggaaggatacgtggggttacggattgggttttttattttttaggtttagagtttatttgtgtgtagcgtggcggtggcgttggtaatgttggtagtttcggggggcgggggttttatacgcggttttatcgttttttaggtttgggtttcgaggcggcggtggaggtggtggtggcggtggcggcggtagtatttagaagtcgtttttgcgtttttttatagtttacgtgggttcgaggaggaggagtttaatgtttcgtcgttcgttgattggttaaagcgttattaatcggtcgtaaggtttcgaggggttgggggacgggtttttttttatagagttgtgtcgtgattggcgtaaggggaaatgatggaacgtttacggtttttggagtttcgaggaggcgcgttcggtttttacggtgttttacgtcgattggtttaaggattgacggattgtgagtaattgaaaaggttcggggtttgtgtcgggggggcgggggtttgttttatattgattggtttatatgggattgatggaagatagtttttaaggacgggggtgggtggttttgtttttttttgattggcggacgagggatttttagatttttgttaaaatattaagggggcggtgtcgtacgttatgttgtttagcggaagtagggtttgtatagaaatgggcgtagtagtcggcgggagtgggtcggattgggtttcgcgtaggcgggtagggtagttttacggttagataagattatagagttgggtaaagacgaatttagaatatagcggaggtaggagggtaggatggttgttaggtatacgaaagagtattgagtggtagaaacgaaatgtttttagagggtagggttgaattgcggttagagttaaaaaggggaggaatttggttttgtattgattggcggtggttggatttaatttagaataggggttcgattagggagagcgggatttaggtttgtgtttattggaagttggaatatttataagtaggggttaagataaggtagggttgagttagggtttgggtgtaatttggggtatttggggaatgattgggtgtgtgaaagcgtaaattttagggttttttgattgttgtgggaatgaataaatttttattatgaattggtttattttttatggtaatttaaagggtggcgtttaggaaaaggaatggaagaaagggtgaggtggggggtttaggttgttaagatgatagaagagagggtagtgtataaggttaattggtaaatattgttaggtaataggttggaggtaggattgttggggtattttggaggttttatagagagattggatttttgggttttttagtaattttgtgttttaggaataggttttcgtggtaattagtagggtttatggggaaaaagaagggttatgtgatttaaaggtatttaggttttttaatgtttgaggatggggggaagaagttaatggtgaggtttttttgggaaattttgtaggttttgtagttttttaagtttttgaaaaagaggatagaagagattgaataaagattgggtttgggttacgtttttaggtttgttttgattttttttttttgattttagtttagagggaaagatggttttttttttttttcgtttttttttttttttaggttattattttaaatatagagtttggtagtggggtgagttgtttttatttttagtaatatgtggatatgggttttgatatttatggagtttttggtgaggttgttgttgagtttagagaaaagaaataagaaagggtaaaatgggttttatatgattatgatgatttttttttattattttaagatttatttatattttggatgatttttatttggtttatttttatgtggaaatgttaagttattatttggtttttattgatttaaagattattaaatgtttattgtatgttaggtaattttaggtattgggagatagtagtaaatataataaataaaattttcggtttgatggattttaaatttttgtaaagaaagatataataaaaaattaatggaataaaagttatgtgttagatggttttaattataataataaaaattaaaaatgagagataataaggagtataggagtggggggttgtaattttaaagagggtttagggatggttttacggagaagtatttgagtaaagatttaaagatagtgaattttgagtagtgtggttatatggaggatgtgttttat

SEQ ID NO: 149 - DNA, 3814 bp, Artificial Sequence
  chemically treated genomic DNA (Homo sapiens)
ttttttattttttattgttatttatttagcgttgtgtagtagtttagttgcgtgtttgtcgggaggggttgttaagtgttttgtttattggttgtttttcgaatttttgttattttacgtataaatatatttatatattttttttgtttagtttatatattgagttattcgtatatgcgagtatatttttttttttttttttattttttcggtttttgatttttataagtttatggaatatttttggaaagacgtttttgatttagtagggtaggtttgttttgatttttttttttgtagttttagtattttgagaaagtaatttatttttttggttagtgtttgtattttagtagggagatgaggattgttgttttttatgggggtatgtgtgtgtttttttttttttttaggatttgtaggattttttgtgttatttgtatataatttggtaggtttatattttttaagagttttatgaagtgttttttgtatgtgttttaaaaaggtatttgaaaattgaaagtgtgatttatggaaattaaattatttgtaaaaaattgttttggaaagtaatgattgttggttataaagggaaatatttgcgatgtatttaatgtgtttttaattttttatttgttgataatttatagttattaatgttaaattcgattttggttttagttatatttgtatattgtttaataatggtttatttttgtaagaattagataaaatgtatatttgatataaaatagttaaaaatgtaatttttagtaatagtaagtttggtatttagatagattatgaatatttcgttagatattttgttgggtgtttgggatagtaattaaaataaagtattgatagttgtattagagtttattaggttgtagtaaaggaagtttatttaaaagtataaattatttaagattatagacgtatgatatattttatttattttttgtttttttaatatgtatatatatatatatatatatatatatatatatatatgtgtgtgtgtatgtgcgtgtgtatgtttaatttttaatttagttaaaaatttttttttatttgttttttatttggatatttgattttgtatattttagtttaagtgaatcgagaagatcgagttgtaggattaaaggatagatatgtagaaatgtattttaaaaatttgttagttggattagatcgataatgtaatataattgttaaagttttggttcgtgatttgaggttatgtttggtatgaaaaggttatattttatatttagttttttgaagttttggttgtataattaatttgtggaaggtatgaatatttatgtgcgttttaattaaaggtttttttgaattattttttatatgagaatttttaatgggattaagtatagtattgtggtttaatataaatatataagttaggttgagagaattttagaaggttgtggaagggtttatttattttgggagtattttgtagaggaagaaattgaggttttggtaggttgtatttttttgatggtaaaatgtagttttttttatatgtatattttgaattttcgtttttttttttttagatgttttttgttagtttttttagttgttaaatatagttgtttgtggttggttgcgtatgtaatcgtatattttattttatttgttttatttcggttatagtgtagttttttttagggttattttatgtatatattacgtatttttagttaacgaggagggggaattaaatagaaagagagataaatagagatatatcggagtttggtacggggtatataaggtagtatattagagaaagtcggtttttggattcgtttttcgcgtttattttaagtttagttttttttgggttatttttagtagattttcgtgcgttttcgttttttggtcgtgaaatttagtttttatttagtagcgacgataagtaaagtaaagtttagggaagttgttttttgggatcgttttaaatcgagttgtgtttggagtgatgtttaagttaatgttagggtaaggtaatagtttttggtcgttttttagtatttttgtaatgtatatgagttcgggagattagtatttaaagttggaggttcgggagtttaggagttggcggagggcgttcgttttgggattgtatttgttttcgtcgggtcgttcggttttatcggattcgtaggttttcggggtagggtcggggttagagttcgcgtgtcggcgggatatgcgttgcgtcgtttttaatttcgggttgtgttttttttttaggtggttcgtcggtttttgagttttttgttttgcggggatacggtttgtattttgttcgcggttacggattatgattatgattttttatattaaagtatttgggatggttttattgtattagatttaagggaacgagttggagtttttgaatcgttcgtagtttaagatttttttggagcggtttttgggcgaggtgtatttggatagtagtaagttcgtcgtgtataattatttcgagggcgtcgtttacgagtttaacgtcgcggtcgtcgttaacgcgtaggtttacggttagatcggttttttttacggtttcgggtttgaggttgcggcgttcggttttaacggtttggggggtttttttttatttaatagcgtgttttcgagttcgttgatgttattgtattcgtcgtcgtagttgtcgttttttttgtagttttacggttagtaggtgttttattatttggagaacgagtttagcggttatacggtgcgcgaggtcggttcgtcggtattttataggtattcgcgttcgcgtcgttcgtcggggtggtcgtcgcgttcggtaggagggagggagggagggagggagaagggagagtttagggagttgcgggagtcgcgggacgcgcgattcgagggtgcgcgtagggagttcggggcgcgcggtttagttcgggggttttgcgtgtagttcgcgttgcgtttagagttaagttttttcgtcgggtagttgaaaaaaacgtattttttatttatttatcgttcgtgcgagaggtagattcgaaagttcgggttttttaataaaatatacgttggaaaattagataaagtagtagttatttgtgggggaaaatatttttaggtaaataaatacggggcgttttgagttatttgggaaggtttcgtttttggtatttaaagttgggggtgtttggagttagtagagtttagtagagttttatttatttttttaatgtttttgtttaatgtgttttttaaatttttttttatttagattatttgattggaaatatgttagttatgatgatgattttttgggaagcgatttttgttattcgttttttttttttttttattttacgttttggggttttagagagcgattgggagttgaatgggtttgatttcggagttagttggttgagttcgcgttggagcggattgttggtatgtgatttttgatagtcggaaatttgtaggtgtttcgcgagtttaaaataagttatatggaagtataagtgtttaaaaataattttttgttagtttagtgataagtttgttttattcggggagaatgtttcggagtggcgtgcgggttagttagggtttgcgtttcgtagttattgtggaaggagcgcggtcggtttaggatataggagattattttgtgattttaatggcgaaggttgtgtgtttttattttaatttttttttttataagaattgttttttttttttttttttttttttttatttttttttgtttagtttttttttt

SEQ ID NO: 150 - DNA, 3814 bp, Artificial Sequence
  chemically treated genomic DNA (Homo sapiens)
aaaggagaaattgggtaagagaaaatgggagggagaggagagggagaaagaataatttttgtagggaaaaaaattaaaatgaggatatataattttcgttattgaagttataaagtggttttttgtgttttggatcggtcgcgttttttttatagtggttgcgaggcgtagattttggttgattcgtacgttatttcggggtatttttttcgggtgggataggtttgttattgggttggtaggagattatttttaagtatttgtgtttttatatggtttgttttaaattcgcgggatatttataaattttcggttgttagaagttatatgttagtaattcgttttagcgcggatttagttagttaatttcgaaattagatttatttaatttttaatcgttttttaaagttttaggacgtggggtggggaggaggggaaagcgggtgataggaatcgttttttagaaagttattattatagttgatatatttttaattaaatagtttagatgaaaggaaatttggggagtatattaaataaaaatattaaaaggataaataaaattttgttgagttttgttaattttaaatatttttaattttaaatgttaagagcgagatttttttaagtgatttaaagcgtttcgtgtttatttgtttggaggtgtttttttttataaataattgttgttttgtttggttttttaacgtgtgttttgttaggaagttcgggttttcgggtttgtttttcgtacggacggtaagtgggtggagagtacgttttttttagttgttcggcgagagaatttgattttgaacgtagcgcgggttgtacgtagaattttcgggttgggtcgcgcgtttcgggttttttgcgcgtattttcgggtcgcgcgtttcgcggttttcgtagttttttaggttttttttttttttttttttttttttttttttttgtcgggcgcggcggttatttcgacgggcggcgcgggcgcgggtatttgtagaatgtcggcgggtcggtttcgcgtatcgtgtagtcgttgggttcgttttttaggtagtagggtatttgttggtcgtggggttgtaggaaaggcgatagttgcggcggcgggtgtagtagtattagcgggttcggagatacgttgttgagtggggggaaattttttaggtcgttggagtcgaacgtcgtagttttagattcggggtcgtaggggaggtcggtttgatcgtagatttgcgcgttggcggcggtcgcggcgttgaattcgtaggcggcgttttcggggtagttgtatacggcgggtttgttgttgtttaggtatatttcgtttaggggtcgttttagggggattttgagttgcggacggtttaggggttttagttcgtttttttggatttgatgtagtagggttattttagatgttttggtgtggagggttatggttatggttcgtggtcgcgggtagggtgtagatcgtgttttcgtagggtagaaggtttagaaatcggcgggttatttggaaaaagagtatagttcgaggttagaggcgacgtagcgtatgtttcgtcgatacgcgagttttggtttcggttttgtttcgggagtttgcgggttcggtgaagtcgggcgattcgacgggagtaagtgtagttttaggacgaacgtttttcgttagtttttgggttttcgggtttttaattttaagtattggtttttcgagtttatatgtattataaaggtgttggaggacggttagggattgttgttttgttttgatattggtttaaatattattttaggtataattcgatttggagcgattttaaagagtagtttttttgaattttattttatttgtcgtcgttgttggatagaggttgagttttacggttagggggcgggggcgtacgaggatttgttaaaggtggtttagggaagattgggtttaaaataaacgcgaaagacggatttaggggtcggttttttttaatgtgttgttttatgtgtttcgtgttagatttcgatatatttttgtttgtttttttttttgtttgatttttttttttcgttggttagaaatacgtagtgtgtatataggatgattttggggaggattatattgtaatcgagatagggtagatagaatggggtgtgcggttgtatacgtagttagttatagatagttatatttagtagttgggggaattgatagggggtatttgaggggaagggggcggagatttagggtatatatataggaagagttgtattttgttattaggagaatgtaatttgttaggattttagtttttttttttgtaaaatgtttttaaagtagatagatttttttataattttttgagatttttttagtttgatttgtgtgtttatgttggattatagtattgtatttggttttattaggaatttttatgtgaaggatgatttagaaaaatttttggttagggcgtatatgggtgtttatgttttttataggttggttatgtaattaaaattttagaaaattgaatataaaatgtgatttttttatattaaatataattttaggttacgaattaaagttttggtaattatgttatattgtcggtttggtttagttaatagatttttaaaatgtatttttgtatgtttattttttagttttataattcgattttttcggtttatttgggttaggatatgtagaattaaatatttagatgaaaaataaatagaaaaaagtttttaattgaattaaaagttaaatatgtatacgtatatatatatatatatatatgtgtatatatatatatatatatatatatatatatattaaggagataaaaaataggtgaagtatattatgcgtttataattttggatagtttatatttttgaataaattttttttgttgtagtttaatagattttgatataattattaatattttgttttaattgttattttaaatatttaatagagtatttgacgaagtgtttatggtttatttaaatgttaagtttattgttattaagagttatatttttgattattttatattaagtatatattttatttaatttttataaaaatagattattgttggataatatgtaaatgtagttgaagttaaaatcgagtttagtattaatgattatagattgttagtaaataaagggttaaaaatatattaggtgtatcgtagatatttttttttatggttagtaattattattttttaaagtaattttttatagatgatttaatttttataaattatatttttaatttttaaatgtttttttaaaatatatgtaaaaagtattttatagggtttttaaaaaatgtgaatttgttaaattatatgtaaatggtataaagaattttataagttttgaaagaaaaaggagatatatatatatttttatggagaatagtaatttttatttttttgttaggatatagatattagttagaaaggtaagttgtttttttaaaatgttaaagttatagagagagaaattaaaataagtttattttgttggattaagaacgtttttttagaaatgttttatgggtttgtagaagttaagggtcgagagagtgagaaggaaggaaggaatgtgttcgtatgtgcgagtggtttagtgtgtgaattaggtagagagagtgtgtggatgtgtttgtgcgtggaatggtagggattcgggaagtagttagtaggtagggtatttggtagtttttttcggtagatacgtagttgggttattgtatagcgttggatgaatggtagtggggagtgagggg

SEQ ID NO: 151 - DNA, 3050 bp, Artificial Sequence
  chemically treated genomic DNA (Homo sapiens)
atgtgtgttttttcgtttttttttttttttatgagtgagaaaaaaaagcgtttaaatttttattaatataaattaatgatatataatgatgaaattttgtttttatttttgtttgtgatagggaatgtaaaaatagtaagtggtttagttttacgaattttcgttttttgtttttttcgtttttgtcgggttggatttttaagaatggaggttagcgtatagtttcgcgcgggtcgtttagttttcggattcggcggatgatgttaggcgacgggagcggtcgcggtcgggtcggggaggtcgcggtttaggggagttgggagggagggtggtttcgttaggtcgacggcgcgttcggtcgcgcggcgttgtttggagacggttttggcggcgttgtgttgttgtaaatagtcgtttttttgttattatttatagtaggattttttggttttcgggcgcggcggttggaggtaggtttgcggttcggtttttcgcgcgtttcgaattattcgttcgtcggttttattttgtttcgtttttttttaggtgtttatcgcgggtttcgattttcgggttcgaagagtggagaagggaagatcggggttgtgcggggatatgcgttttcgcgttttggaggtggttagcgcgttggggttgagtttcggtagcgtgatttcggttgttttacgtagtagggtaggagattggggggcgtggtatattttggagtattttgtttttttaaagtttcgtgttttaggacgtggagtcgtttttggggttttagtagtcgaggtatttcgtttaggcgtagttggatattgtttttttagttttcgttttttattttttaagttcgcgttggaaaattattcgttgcgggttttcgtaagtatagttttttggcgggatcgaattagtttttagcgtagatttgagtttttcgtaggaagtatatttcgttttgttatttcgaattgattattttgtttatataattatatttcgtattttttatttttggggtttagtttagaatcgggtagatattttttttaaatgttttcgtacgtaggttttgtatagtgtttatttgttggtgttttagggatttgatagtttttttaatatttttatatatggtcgagaaaaataaataaataaatgcgttgttttttttaaaaaaataaataaataaagtatttagtatcgtaaagtaggttatcgtatttttttattttggattttttattttttgtttttaaacgtaggaatagtgttagtattgttcgagttcgagggttggaggttaggggatgaaggtttgtttttacgttttgtattgaattagggttagaattggggatgggggtaggggcgtattttttcgggagtcgaggtttaagttttcggggttttgtattcgatgtcgttttttttatttttgagttttagaattgtttttagttttcgtataagggtaaaaaggcgttttttgttttatttttttcgatttcgggaataagggttcgtattgaattaggtgcgaatgtttttttttattttgcgtcgttttcgtttttttttttttagtcgcggttttcgttttttttcgtattgtattttcggtgttggttgtagttcgcgagtagttttcgttaatttttttttttttatataggatgtttatattaggatatttgcgttagtaggtttttacggtttttttttgtagttttggggggagttattttcgaaattttttattttggggggtttacgagatttttgagataggaattgcgaaatgtttacgagattaggatacgcgttaaggcgggggtagggagttgcgagcgttggggacgtagtcgggcggtcgtagaagcgtttaggttcgcgcgttatttttttggcgttatcgtggttgagttcgtgacgtttatatttatttataaaacgtttgttataaaagtagtggttgcggcgtttcgtattttaatcgtatttgtagcgagtatttgagaagttaagattgagtcggcggtcgcggcgtagcgaacgagtagtgatcgtgtttttatttagttttgttttatagcgtttatttgttttcgtttttcggtttttcgttcggttttgtttaatcgttacgatgatgttttcgggttttaacgtagattacgaggcgttattttttcgttgtagtagcgcgttttcggtcggggatagttttttttattattatttattcgtagattttttttttagtatgggttcgtttgttaacgcgtaggtaaggttggtttttcgtcgtcgcggggtcgggggtttggggtcgcggaggaggagatatcgggcgggacgttttagtagatgagtagggggtttttttgtgtttggagggaggttgtcgtggtcggagcggtgtcggttcgggggttcgggatttgttttgagcgtacgtacgtttgttatagtaagaattggtttttttttcgggaggtaggttcgttttgagtaatttttggtttgtattttaggacggatttttgatattagttggagtagacgtgttttaagtataaattcgttaattagagtttggttttttcggggaggtggtagaaagcggtaattttttttttttcggtagtttggagtacggaggagggatgagggaggagggtgtagcgggcgggtgtgtaaggtagttttattgataaaaagcgagtttattttggagatttcggagcggcgtttgcgttagcgtagacgttagggatatttataataaatttttttttaagtaagtgatgttgaagggataacgggaacgtagcggtaggatggaagagataggtattgcgttgcggaatgtttgggaggaaaagggggagattttttatttaggatgagggatatttaagatgaaatgttcgtggtaggatcgtttttttttattgttgtatgcggtattgggaattcgttttatttgtgttcggaatttgttcgtttacgtcggttttttttttttgttttgttttagg

SEQ ID NO: 152 - DNA, 3050 bp, Artificial Sequence
  chemically treated genomic DNA (Homo sapiens)
tttagaataaaatagaaggggaaagtcgacgtgagcgagtaggtttcggatataggtggggcgagtttttagtgtcgtatgtagtagtgaagagaaacgattttgttacggatattttattttaaatgttttttattttggatgaaaggttttttttttttttttttaggtatttcgtagcgtagtgtttgttttttttattttgtcgttgcgttttcgttatttttttagtattatttgtttgaaagggggtttgttataaatatttttgacgtttgcgttgacgtaggcgtcgtttcggagtttttagaatgaattcgttttttattaatgaaattgttttatatattcgttcgttgtattttttttttttatttttttttcgtgttttaggttgtcgggggaggggggattgtcgttttttgttattttttcggagaagttaggttttagttagcgagtttgtgtttgggatacgtttgttttagttaatgttagagattcgttttggagtgtagattagaggttgtttagaacgaatttgtttttcgaagggggaattaatttttattatggtaagcgtgcgtgcgtttagagtaagtttcgagttttcgagtcggtatcgtttcggttacggtagtttttttttaggtataagggagttttttatttatttattggagcgtttcgttcggtgttttttttttcgcgattttaagttttcggtttcgcggcgacgggaagttagttttatttgcgcgttgataggcgagtttatgttggagaaggagtttgcgggtgagtggtagtaagagaggttattttcggtcggggacgcgttgttgtagcgggaggatgacgtttcgtagtttgcgttgaagttcgagaatattatcgtggcggttaggtaaagtcgggcgaggggtcgaggggcggagataggtgggcgttgtggagtagagttgggtaggagtacggttattgttcgttcgttgcgtcgcggtcgtcggtttagttttggttttttagatgttcgttgtagatgcggttggagtacgaggcgtcgtagttattgtttttataataagcgttttatgaatgagtgtaaacgttacgggtttaattacggtggcgttagaggggtggcgcgcgggtttgggcgtttttgcggtcgttcggttgcgtttttagcgttcgtagttttttgttttcgttttggcgcgtgttttaatttcgtgagtatttcgtagtttttgttttagaggtttcgtgggttttttaagatgaggggtttcggggatggttttttttagggttatagggaaaggtcgtggaaatttgttgacgtagatgttttaatatggatattttgtgtaaggggggagggattgacgggaattgttcgcgggttgtagttaatatcgagggtgtagtgcggggggaggcgggggtcgcggttgggggaggggaggcgggaacggcgtagaatgagagagaatattcgtatttggtttaatgcggatttttgttttcgaggtcgggggggatggggtagagagcgtttttttatttttgtacggaaattgaagatagttttgaggtttagagataggagaaacggtatcgagtataggatttcgaggatttaagtttcggttttcgaaggaatgcgtttttatttttatttttaattttagttttaatttagtgtaaagcgtggaagtagatttttattttttaatttttagttttcgggttcgagtaatattagtattgtttttgcgtttggaagtagaaagtggaggatttaaaataagagaatacgataatttattttacgatattgggtattttatttatttatttttttaaagaagatagcgtatttatttatttatttttttcggttatgtgtgggaatattaaggaaattgttaaatttttgagatattagtagataaatattgtgtaaaatttacgtgcgaagatatttgaagggggtgtttgttcggttttgagttgggttttaggggtagggagtgcgaggtgtggttatgtgggtagggtggttagttcgggatgataaggcggggtgtgttttttgcggggaatttaaatttgcgttgagggttggttcggtttcgttaggaagttgtgtttacgggagttcgtagcgggtgattttttagcgcggatttggagggtggaggacgggggttggaaggatagtgtttagttgcgtttgggcggaatatttcgattgttgggattttaggagcggttttacgttttggaatacggggttttggggaggtaaggtgttttagagtgtgttacgttttttaattttttgttttgttgcgtaggatagtcggggttacgttgtcggggtttagttttagcgcgttggttatttttagggcgcgaagacgtatgttttcgtatagtttcggtttttttttttttatttttcgggttcgggggtcggggttcgcggtgggtatttggagaggggcgaggtaggatgaggtcggcgggcggatagttcggggcgcgcggggagtcggatcgtagatttgtttttagtcgtcgcgttcgggagttaggagattttgttatagatagtaatagggaagcggttgtttatagtaatatagcgtcgttagggtcgtttttaggtaacgtcgcgcggtcgggcgcgtcgtcggtttggcgaggttatttttttttttagtttttttgggtcgcggttttttcggttcggtcgcggtcgttttcgtcgtttgatattattcgtcgggttcgggggttgagcggttcgcgcgaggttgtgcgttaatttttatttttagagatttaattcggtaggagcggggagggtaggaggcggggattcgtggaattgggttatttgttatttttgtattttttgttataggtagaggtgaaaatagaattttattattgtatgttattggtttatgttggtgggaatttaggcgttttttttttttatttataaaaagggagggaaacggaaaaatatatat

SEQ ID NO: 153 - DNA, 2312 bp, Artificial Sequence
  chemically treated genomic DNA (Homo sapiens)
tgttggaggggtgtttcgggagttatatgttcgttttttattagtaatcgtgtaattacgtttatcgggtgtgagttttttttttttttttttttaggagagcgcgtttttcgtcgttataggtagtaatacggtggtggaggttaaggggtagcgggttcggggtcgattgtatttttgggggatcgtggagggtgagtagagttttggggtattaggtttggtgggggaaggttgttttgggtcggcgttagtttattatttatttttatttcgtagtggagaattaggcgtattgcgatttcgtgaagttgcgtaatatgtttattcgtacgtatatgtacgattttaaggacgtgacgtgcgacgtgtattacgagaattatcgcgcgtattgtatttagtagatgattaggtgcgcgttttagtcgcgagttagatttcgtttttttggtttcgtttacgtttttataattgagggtcggttttgttagtttatttagatttgaattttgtattattttttaagtttttttttttttttagagtttggtttttttagaattaagtttagggttgtgagggtttcggagggtagggttttagtagtggcggggatgggttaggtatcgttagtttacgttgagtttttcggtggcgtcgtttcgtttattttttttttcgtttcgcgtagtaaattgatttaggatagtcgtatggagagttttatttcgattttgtcgttgtttatttcggacgtcgagattgagaagtttattaggatgaaggatgaggaagtatgtggggcggcgggggcggcggaggcgggcgttagggatgttttttcgcggtgttgtttattcgtcgggttgttttcgttcgtagttgaggcgtatgtaggagatgttgtagaggatgaagtagtagatgtaggattagtgacgttcgtcgcggatatatcgttcgttttcgggacgttttcgtatttttggatattagatcggattgttttcgattcggagacgcggggttatagtttttagttgattttaatttatttttagtattatttttttttaggttattgtgtttgttttcgaggggtttggatcgtagttttcgtttagttggttttttttgattttgggggattaggagcgaagttgggcgggattttagagattcgttttttttgtttttttttcgttttcggacggttatagtatttaaatcgtaggttttgttttggtaggtaggtaaagttaggtagaagaggatttttaggattttgggtttgttttttgttttagtgttgtagaacggatttgggagtttttttttgtttgttttcgcgggttatttagcgagtgttgagattttattttttgtcgaggcgggtcgagtttttttttatttttagacgtttagcgggtagggttgggttgaattaaatgggagttttttagatataaggaggttagaggttgtaaggagcggggtcgtgatcgtttatattttttttttatagttcggttcgatttggagggttttcggggtattgggcggtgagttattttttggtaattttcggtgtcgttttttgttttcgttcgaggttttttttttttagtatcgttgtggtgtgtcgggattttgagtttaggtttttcgatgtttttattcgtatgattttttttcgttatacgatgtttcgttttttttcgttgtgaatgtcgcgttttgttttggtgataggagaataatgttggtgaacgtcgtagcgggtgttcgagtgtttcgtgtgtttttgagagcgggtgggagcggaagtttgagcggtttgcggttttcggcgatagtgtgttatttgtcgttgtagcgcgcgttcgcgcggtttttgggttatttttggttaggtcgtagtattgtggtcggtgcgggcgtggtaggggcggggcggttttatcgttcggttttttcgtttacgtttttcgttgtagagtaagtcgggttgtcgttttttcgttatgggtttcggtgagtttggagttcggtcgggttttcggttgttttttaggtcgattcgggttgagaggagttttggtcgtttggttgtagttgggagagatttgggttagatttagaggggatttttagtcggcgtgcggggtggttagggtggagaggttggcgggttatcgggacgtcgggtattaggggttggatggagtcgggtcggtagtttgggtatttagagatgtcgtttaggtgttcgtcgatcgttcggtttattgcggcgttttttttgtagg

SEQ ID NO: 154 - DNA, 2312 bp, Artificial Sequence
  chemically treated genomic DNA (Homo sapiens)
tttgtaagggaagcgtcgtagtaagtcgagcggtcggcgggtatttgggcgatatttttgagtatttagattgtcggttcggttttatttagtttttgatgttcggcgtttcggtagttcgttagtttttttattttgattatttcgtacgtcggttggaagttttttttaagtttgatttaagttttttttagttgtagttaaacgattagagttttttttaattcgggtcggtttagggagtagtcgggggttcgatcggattttagatttatcggagtttatggcgagaagacggtagttcggtttattttgtagcgggaggcgtaggcgggagagtcgagcgataaggtcgtttcgtttttgttacgttcgtatcgattatagtgttgcggtttggttagaaatagtttagaggtcgcgcggacgcgcgttgtagcggtagatagtatattatcgtcggaggtcgtaggtcgtttaggttttcgtttttattcgtttttaggggtatacggagtattcggatattcgttgcgacgtttattaatattgtttttttgttattaggataggacgcggtatttataacggaagaaaacggagtatcgtgtggcgggaagggattatgcgggtgggaatatcgggaggtttaggtttaggatttcggtatattatagcggtgttggggagaagaggtttcgagcgagggtaggggacggtatcgagagttgttaggaggtggtttatcgtttagtgtttcgggggttttttaggtcgggtcgggttgtggagaaggggtgtaagcggttacgatttcgttttttgtagtttttggtttttttatgtttggagggtttttatttgatttagtttaattttgttcgttaggcgtttggggataagggaagattcggttcgtttcgatagaaaatggggttttagtattcgttgggtgattcgcgggagtaggtaaaggagggtttttaagttcgttttgtagtattggggtagggaatagatttaggattttgggaatttttttttgtttagttttgtttgtttgttagagtagggtttgcggtttgggtgttgtgatcgttcgggggcgggggaagggtaagggaggcggatttttgaagtttcgtttaatttcgtttttgattttttaaggttagagagggttagttgggcgggggttacggtttaggtttttcggaaatagatataatgatttgggagggggtggtgttgagaataaattagggttagttgggggttgtggtttcgcgttttcgggtcgggaatagttcggtttggtgtttaggggtgcgagggcgtttcggagacggacggtgtgttcgcggcgagcgttattggttttgtatttgttgttttattttttgtagtattttttgtatgcgttttagttgcgggcggagataattcggcgggtgagtagtatcgcggaggagtatttttgacgttcgttttcgtcgttttcgtcgttttatatatttttttattttttattttgataagttttttagtttcggcgttcggggtgggtagcggtaggatcgggatggggttttttatgcggttgttttgggttagtttgttgcgcggggcgggggggaggatgggcggggcggcgttatcgggaggtttagcgtgggttggcgatgtttggtttattttcgttattgttgaggttttgtttttcggagtttttatagttttggatttggttttagggagattaggttttgggggagggggggggtttagggaatggtgtaaagtttaagtttgggtgggttgataggatcggtttttagttatggagacgtgggcggggttagaggggcgaggtttggttcgcggttggggcgcgtatttggttatttgttggatgtagtgcgcgcggtagttttcgtagtgtacgtcgtacgttacgtttttgaggtcgtgtatatgcgtgcggatgagtatgttgcgtagttttacgaagtcgtaatgcgtttggttttttattgcggggtgggggtgggtagtgggttggcgtcggtttaggatagtttttttttattagatttggtattttaagattttatttattttttacgattttttaggggtatagtcggtttcggattcgttgttttttggtttttattatcgtgttgttgtttataacggcgaagggcgcgtttttttgggggaaggagggagaaaggtttatattcggtgagcgtaattgtacggttattgatgggaaacgggtatgtaattttcggggtatttttttagta

SEQ ID NO: 155 - DNA, 19634 bp, Artificial Sequence
  chemically treated genomic DNA (Homo sapiens)
tttgttaaaaatataaaaaaaattagtcgggtatggtggcgggtgtttgtagttttagttatttgggaggttgaggtaggagaatcgtttgaattcggggaggcggaggttgtagtgagtcgagatcgtattattgtattttagtttgggcgatatagtaagattttgtttaaaaaaaaaatttagaatgtgtttatttttttttttattattttttttttattaatttgtttattttattagttatgttttgatagttttgatagggttgtgggatatagtagaaaggttggaaaggtatggatagtcgtgttgggagtgttgttcgagtaattttttgtttttagttattttttattattttattaaatataattattttattatgttttgggtggtacgaagtaatttatggtaggatgttttttaatttagtgttaaaggtaatggtgtattttgagttttttcgttttgtattttaattttggaattggtaattttttatgattgatatttttgagtttttatttttttttatttttagggaatatttgaggaggtgaggttttatttttttatttttcgcggtttaattttcgttcgtttttttttcgtttcgtttttcgttttttagagttgagatttgggtatgcgtattagtcgtaatagattggaggggattttgttgtttatttttttgttattttttttttttttttttttcgatcgtttttatattttcgtttttatttttattttttattttcgtttcgtattcgtttttagttcgggttcggggatttgttaggttggtttcgatagttggggaattaatttgtttcgtttatttttagtttcgagtcgcgtaggtttcgcgttttcgtttttgtttttttttagttttttcgagtggaagtcgttataaatggtttgaatgaaacgtgtgtgggtttagtgagtggtgaattattaggggatttcgtttttttataaattagtattttttcgaggaggaggcgaaggagtgggaggaggtaacgagtcgagagtcgagtttcgcgggcgcgcgtagcggttggagcgcgggggcgaggtcgggttatttttttttttcggtcgcgtattgtttggttcgcggcggttttaggtattatttttttcgttcgggttgagttcgttgtggtagtgattagttttcgcggttagcggtattgtttatcgacgagcggcgttttttttttttttttttttttacgatttttttttttgcggcggtacgtcgtttagtagtttgtttcgtttcgtcgttaattttgagttggaggagaagtaattttggtagtggtcgcggggttggaatttcgttttttttcggtagtagtaggttcgtaagtcgttggggttaggtggggtaagagtttcgtcggcgtattagcgttgtttcggattgtttgtaacgtgtttttagcgagttgggagcggggttgtgattgcgagtcgtttgggggagggggatttgtttttttttttttttagagatttcggtttgtaattggattaaacgttgtcgaaaggatgtaaataggtagagtaattgttattaagaaggttattatttttatttaaaggtagtgaggagtgtggggtttcgtttgggttttttcgagttttaatagtaattaatagttaggtgttgattgtaattttttaaggttagttatcgggagtagtttattttttttaggaattttggagggtatattttgttgggatttaatttggttgagaaatgtataagatgttaaaggaggaaggattatagggggcgtgtgtgtgatttttaagatcgatttttcgttattattttaattttcggtttttcgttattcgggcgggggtgagtatgtgatatgtgtttaatttttagtagtaatttcggtagtaggtgtcgattttaattaagtaggagttgcggttgtcgggtgtgtttttattaagttatgcgagtttcgggcgcgtttttcgttcgtatgtcgcggttattgtttttgttattgtttaaggtgtttgttttttttgttttcggggtcgtttttgcgtttagaaacgaaatttgtttgggggagagttgtgtatttatagtgatttagcgtcgcggtagggacgtttggggatcgggaaattttgtaagagacgttttgcgagttcgagtatttagggaggagtagggggtagcgttttttgcgggatttttttgggatttgtcggcggtttcgggtcgtgattcggttgtaggtagaggggcggaggcgtcggtagtcggattttcgggatttttaattaggttatttggtttttggaggtggaaaggtgttcggggttaggagttttttgaaattttggggagagggaattttacggttttttagttttttttttagattttagaggaggaagagaagggttttagaggcgttggtattttcgggcgtagttaggagtagagtgtgaagatagttttcggagttagcgattttttttattggttaaggagagtcgggaaattttagggtttttattataagtttttgtttaagacggttaatggattggcggggtacgaagggtggataattgtattttcgggtcgggcgttggtttagaatggatttttgggtgaaggaatttatgagtttgggggttttcgtcggggaaatagtacgaatcggcgtgtgagattgaagaattttttttattcgttgatttaggagttttatggagtttacgcggttatgtgtttgttcgtggtgattttcgggatcggtattattggtaatttggcggtgatgtgtatcgtgtgttataattattatatgcggagtatttttaatttttttttggttaatttggttttttgggatttttttattatttttttttgtttttcgttggttattttttacgagttgattaagaagtggttgttggaggattttttttgtaagatcgtgttttatatagaggtaatgttttttaggggtttttaagttagtggttttatttgttttcgggattatagtattagagaattgttgttggatgtatttatttagttgaacgttttttttttttatttggggtttttttttatttttttttttaattatttatgtatgtatgtatatataaaaagaggtagtttcgcgaaattatttttaaatttatttgtttttgggttgtaaaaaaaggatgattttataatatatagaattgtttggagtataaatttatttttttgaatatggtgttatgcgtatttttgatttggtatttgttagagattttagggttaagtaaatggttagtttaaggttgttattattagagtttataaggaaaaaaaaaaaaatattagtatttgtgtattagttattaagtgttttaatgtgagtttttttttaagaagattattgtatttttttttaaatagtaaagttggagtaatattttattgaaagaaagaaagaaagaaaattgtgtttgttagttggttttatgatatattaataattttttaaattagtttaagtgtttgattgttttttatgttattttatttaaatttttaagttattttttgtttttgtttttttttatttcggttttttaattttatttttgtgtgtttgcgtgaatttaagtaaaaataagattttggttagcgtggtatataatttgtttaatatttttaaagttatatatttgttatttgttatgggtggaaagattggttattttaagggattgattttaagattagaaaattttttgggaagaagggggtatatttagtttttaaattttggaaataaaaattattttgagtgaaattgtattgttttattttatagttagtgttttggtttattattgtggtaggtggattttgttttttaaatggtttttttttaaatattagtttttggaaggggtttaattgttttgttgttagttgtgtttttagttagttggtttttgattttttttatttagattgtttattttatttatggaagtagaagaagggaaattgtaaatatttcgtagtttttgattttgtttggtattagggtttgtgatattatgtttaatattgttttaggtttaaagttgggggataagtaaatagaaaatagtatttatttagacggattaaagttggagatagtaaataagattttttgttattttgatagggattaggtgtaggattattttatgattatgaaattagttgttgttgttttagtagcgtttatgattttttttgttgttaagtttggcgtatttttgaaatatttattttgtttggtagataatttatttttgaattgtgaaggagttagttgaatttatgttagagaatatgtgtttatttattaaattgtttttttaaggttagttttaaatttttttttttttttttttttttttattagaagaaattgatttatgtaagaaagagataaaagtataaagcggataagagaggtattttaatgatagagaagtgtattggtttattttattggaaatgtattggatatgtagaaatttgtatatattagagggaaaaataataggatagaaaaaggaaattggggaaagaaaaataaaaatattaaagtttttgaaagaatattttaaaagaaaagaatattaaatttaggaaagattataaaaattttggttaatttaatgagatataagtattttgagtaatggtatttattatgtatttattttaatttttttttttcgtaattttgagtttgtataaatgtaatatttttttttatttgtattttattttttaatttaattagtttttttttaagagtgttttgttttttgttttttattattagtaaaattttttattttttgtatttttgtttaatttttttttattttagtagttttttttattttttagttattagtgttagtatttattttttttagagaattaaaggtttaaaaaatttatttatttattttttaaaattatagtataatatatatttttattgttaaaatagtgaatgaatattttaatatgtagtatttttatatttttatttaatttttattattttgaaataattttagaatggtttataaaaataattattggataatattgttggttttataatttttgattattgagaataagaattatagtttaaattttaaaataaaagtgtgtttttaggaggtattgatgtttttataaaagtaagaggtatttagggttttttttacgttgggtttttgtaaaaataggttttgagatgtagatttattggggtattaagtttattgggttgtgtttttaggtttaatttattaaggaaagaagaaagtaggattgggcgggtaaagggagaagttgaattgtgatgtaattgttatagagattttagttgatattattaggagttttagggttgggatggttatgtagttatattttaaattgaggtaagagggtttagtttttatatttttttatggattagttattagatgtaagatattggatgtaagtttgtttttaggatggggtataattttgagttgggtggatttttttggttaagggtaatttttagagagggatgtagttaagtattgttaattaatagttttagtagttggaggaattagtgttttatttttgaaggattttggagggagttgtttgggtggaaaattatagtatttattatagtagttttttttttttttttttttttgagacggagttttgttttgttattaggttggagtgtagtggtacgattttagtttattgtaatttttgttttaggggtttaagttattttgttttagttttttaagtaattgggattacgggtgcgtgttattatattcggttaattttttttgtatttttagtagagatgggtttttattatgttggttaggatggttttgattttttgattttgtgatttgtttatttttgcgttttaaagttttgggattataggcgtgagttattacgtttagtttatagtagtttttgaataattatgttaaattagatatagataatgttttaatttaatttttttattttaaagatgaaatttgaagtttagagattattttaaatatatatatttggttagtagttattagatttttggttttaatgttttatgtttatatttgttgattagattaatttgtatgaagtataagttttatttagtgagtgtttttttttttttttcgttttttggtatttgaaaaattttttttttttttaatttattagataggaaaaaataaaaattcgtaaatattatttgttatataatgaaatgtatagttttttttgttttttataaattgttagtaagttttgtaattggtagttaattaaaattttttaaattgtagtaatttgagataattatattttttaatttgtttagtatgatgattttaatgattaaaaagttatataggttaaattttatgtttttaaaattatgaagtatgttagattggtgaaggatattataagtatattatatttgtttaaattttttttaaatttttttttaaaattttgtttttgattttaagatttttaaaaattttttgatattttgtttatttttatatttttaaattttgttatttttttatttgttatttttttattttattttttggttattttttttttttttaattatgtataatatttttttatagatttatgatgtagtatttattattttttagtaagatgtttaattttttttagtgtttttatttttaattttttcgtagttaattttaaattttatttttaatagattatgattgaattttataattttttttttttagttttttttttgttttattttttttttttattatagtttttttttttgtatagtttgagcgttagtataatttgaagggaatcgtgggattttggggaagatttgggtttgtgtagaaaaatatgaggtattttttgagtaaaaattatattttttttaatttttatttaatttttttttttattttaatttgttggtttaaagtttgaggatagtatttagtttttaaggtttattgtgagaaaggaagttttatgatgtttaatattgtcgtgagtgagaatgttttgggaattgttgtagttgatgatttttttttttttattttaggattatgatatttttatggtttaataataaattttataaagtcgaaggataaatgaaatggtaggaaatgttagataggagagaagaaaatttggatagattatggtcgtttttttagatatattagtttaaagtggtttattatttagttataagaaaaaaattatatttaaaataaaatttgtatatgtagtgtgtttttatgtgtattaggggaggtggagatatgtgtgggtgtggattgtaataggagaatggtagaggagttttttattatatttattatttatttaggaatttaataagtgtttaaaattaaataatttgggttaggtgtggtggtatatttttgtaattttagtattttgggaggtttatgtaggtagattgtttaagtttaggagtttaagattagtttggttaatagggcgaaattttatttttataaaaaatataaaaattaacgggatgtggtggtgtatgtttgtagttttaattatttaggaggttggggtaggaggatttttggagttttggaggttgaagttgtagtgatttatgattatgttattgtattttagtttaggtgatagagtgggattttgttttaaaaaaaaaaaaaaaaaatttaaataatttagatattaaatatggtaattggaatgaatttttgtttattatttaatggaagttagaattaaggtattatttgatcgagattttagataatagattaaggtttgtttggatattaattggaggttttgaatgatcgagattttttttagtttaaagaatttatatttttatggagtgttgtagaatagaaggttttaaataattataatgagataattttagatttaattgtatttttattttattgggataaaatttttgtatagaggtggagagagaataaagggaatatgttttattatggtttttggtttgggaataatttgtgataagtttagaattttttttaatgagaggaattagtttttttaatgattttagtaatattggttttaagttgagtggaataaatggtttttttattgttttagattgtagttagtattgataagaaagaaagggtttttggaggttgaagatgatagtgttatataattatttgagtttatatagatttttttagaacgtttgtatttaagtaatagaatatttattatggtatatggtaaattttttttgagaggtggattagttattaggtattttgtcggatttttaagtggaaatttattgttttatgagtaattttaaagttattaatagtatttttagggaaaatgtgtttaatatatgagaatggtgttgaataaatattttatgattttttattaattttttagtaattattttatatatttttatgtaaatgaaaatatttagttgatgattttaataggaagaaaagtgttttttagagtgtatttttatttataattttatttttgaatggtgtatggtgaagttaattgaatttggattttttataagaaagaaaagttttataatatttaaataagaaatttaaatagtttttttttttattgattataatgagaatgtgtttttttttaaagtttgttaatgaagtataaataggaaaattgattttttaattttttttttatagatattgtttggtatttagtttttaaggattatatataaaatagtagtatttaataattgattaaagaataatttgaataatttattattttttgtaatttttttttataggtgttattattcgtttatttgtttattatttattgatttattaaatgtttatttggttttttttttatgcgaggtattattaggagtgggtaggagaaggtaatataggaagagggggaaaagtttttaaagatgaatattatagatgagttattgttattaaaattatagaaaagtaaagtaatgttttatattatgatgaatattataatagaggtttgaataaagtatcgtggaagtttagaaatggtattgaaatgggttaagttatagttgtgtttgttatgattagagatggagaaattaaagggaaaattgtgttttttttaattttttttagttatatttttattattaatttttataaattttataaatgtttatatagtttagatttatgatgaaaagttataaatgtgaaaattttttaatttttgtttttttgttttttttagtttttttaggatagaaagtttataataataattggtaaaataatttagtaaatagtttagttttagaaattttttttaaaatatggaatttgtgttagtgtttaggatatttatttttgttttataattagtttttattagttataaggatattaaatacgttaaaattaaatattttatttaaatgaatggtttatttggtaatgtaataatagtatattaaattgagttttttttttttgaaaaaattaaaatatatataaattgtttaatttgattttggagaatttaagaaagaagatggataagggcgatattttagattttattgtggagtcgaggaaaggggagtacgatgaatggatttttttaagaattggattaattttttaagtatataattagagtgaagatttattttgagtttttgagggtttttaaggtattttgttatgttagtaaagtatttttttatagagataaggaggtaaatgtgtttgtagaagtaaaatagatatgagtttataagtttatcgaaggttgagtgggtgagggtttatttttgtttttatatttaggttgtatggattttgatataatttttatatttttaatggtattcgttttatgtgcggtaattttttaatagtattttattggaagtatatggatttgtgtttgggatgtagattgtgggagagggatgggaaggtagttatgtagtgtagtttgtttttgtttttgtatttttgttttattttttagggatgcgtttgttattttattttttatgaattgatttgttaaggtttaataatgaatttaattttgttgttaagattaatttttaaatattttaattggaataatattttttgtgttagaagagatgattttatttaaaattttagagtggagttgagaatgggattattgtaacgttaaatatggagggtttttttttatttgtagagtaagtgtaggtattttttataaatttttataaaacgtaggatatgattattgtgttagttttgtttttgagatagaatattttttatttgtgaatttgtaatagtttttagtgttatttgtttgtatatttgaatagtttatagtatttattaatgaggttaaggttattgatttgatttttgtttagaatgagatatttttattaggtttgtgattttatttagggatgttatttttttttttttttttgttaaaatagttttttttttattaatttttatttttagggtttatttttattattgtttttttaatttaaattttttttatatcggaaaagtatttgataagttaattcgtattaagatatgtaatttagaaataattgttttttataagaagattgaattaagaaagaaatttttttaatagattattaatagtgaaattttggttaaaagtagataaattttgttttaaaatatggttttttaattttattaaaattatgatgatttaattatatataattttgtttttagtttgagtttatagttatgtaaattaatattattagttagaaagggaaataggtaaaaatgtgttattgttttttggaaatttattagaattttaaggtaaggaattgaaattttaggttattttaagattgattaggaatattataataatattaaagattgagaattggattgtgggtttgggggaaatattatattttgaaatgattttgtaattattgagaataaatatggaatttttagaatttaatatagatggtttatattttaagataaaatgttgttaattttgttttatttatatttttattttaataaatatttgatagattgataggaattataatatgttaggttgtagttaaatgaatttttttaattatataaggaatgtattgtgttatagatattataattggtaataaattttaatttaagataggattataaaggaaaagaggatttatggaattaagataagttttgggagaatatgttgatttttaaatagttttaaacggtttttaaaataaggaaagcgtggtattaagtttaggtaaaagaagagaaggtggagaatgaggtagtaaggatagttgatagttgatgtttttaaaatattttttttttacggtattgggaattatatgtaaatggaatagtttgagtatattagaaataaatggttatttattatatgtgggtatattagattaaatattagttgataaggataagaagttttttttttgattgtggaatagtggttgttagagttttgttttattttagagagtgtataagtagtgtgtgtatgaatgtaaggggtgaggaaagtttttttttttttgtttttggtttagaaatgttaatcgaagtgtgttattgttatagtattatgatttgtatatattttaaaattaagattttttgtaaaaggttattttatttagagtagtttgataaatagtggttttgataaatttgtttttttatttgtgtttaaaaaagtattttttattgttgttttgaaatgttgtaaggataaggataatggaaaaatgtaagaagaagttaaaggtatagaagttttagttatttagaggttttattttgtgtttattttgttttttttttgattggttgttaggtttgtaattattgatataataggttattatttatagtttaaatgaatgggtttttttaataataatgtttttgttttgagggttatttgtaaataaaggatagtatataaatagatgtatttaaagattttttatgtaaaatataagttagtttagaatgtagttaataagaatttggttagaaatttttttattttataaaaattagtgtattttagttattttattgtatttgagtatgtagatttaattttataggaaggaaattttgtttaggatattgtttcgttttttttttttttatcggtgttattattgatttgtatcggaaagttttgcgaaagatataatttattttatgatttgtattttatgggttttgtgttgtttattttacgttttatttttatttttaattttttttaatttgtttgtagttagtttttgagaaatgtagtagtagttaagataggatttttgtagattattggtttttataaagtatttatgggttttttttttatattattttgaatgaatagagatttaatgtagtataaagtggttatggtagtttaggttttttaggttttgatagttgttttaaattagaaatttgagtagtgggaaaaatgaaatttagttatattttgatttataaagtatgttttttattttttattaagtattttgttttataagtttttttttgtttgtattattttttttaagagaaatttagggaaatatgggatttgaaattattggaaagagcgatatattttttttttattttattaagagatagttttattttgaatttttttttaaagttattgttgttatgtaatttattgatcgggttaattttttatcggggtataaagtagttgttttaagttggatagtataggtgttgaattaaaatttgggatttacgattttataaatatatgtttaatagagggataaaatatttgaaagttgaggtatatttatggtttttataattattaagttgggtttttttaaatttagttttgttagtggtgataagggattagatgaggattcgtattatttttatgtaggtgattgtatttgtatttttttattattttaattaaattatttgttttttgttggtttttttttgtaataaaatttaaaaggtaatttaagaagttatttataaaaatttttattatatttttaaaattttttatattttataggttttttttttttattttgtggtagatttttatagtgtattatattagtatttataattaggggagaaatatatattattttgttttttattaagaaaattgaggtaaggagaaaatgagaattaatttgttagagtattgaatgtcgtttgaatattgaatatttggaatgttatttgaaatatttggattattaaattgagttaattgtattttaattgtaattaggaataaatttttttagatgattttaaaatggagttttgttagttagaaaaatatttaaaatatagaatataataaaattattttatgagtgttttaagtttttagtatttattttttagtattttataaatttttaaatgagtaaatattgtaatagtataaattttatttttaaaattattattataagagaaaatttatttattatttttatattattatttaagagaaaatttaagaaatttatttaaattttaaatgatttatttaatgattttttaaatgattaaagtaatatataaagttaatggtaattttttttgggttattttttttttttatataggagtaaatttttataattttataagggttattatgtatgttaagagtaataaagagtatatttagatatgaattttgggtggtttttaagtttttttttttttttgtattatttttgtattttacggatttaaatagatattttagttaaaatataaattatgattgtattgtattgttaataaatagttaaattgataattataaggttattttagtttaatagattaagtaggatatagatgatatttgtaaagaattggattatattttttgaaatgtagttatatattaggagaggttttataatttggttagtttgtaaagttagttagatatttgtagtaatttttttaggagatattgtgaaattatgtttgttttttaattttgttaaattagtgatttttaattgtagtttttaggtaaatatggatatgttttagattaaggggagttatagtgagtatgttagaaattgttagttaattttttttgtttagtagattgtaatgagtgattttatatgtaaagtaatttgttggttgtatggtagtaggtgggagatagtcgagaagttttgttatagattttagattttttgaggataaaatttttgttttatttattattgtttttagtagtagttatagtatattttatagatttttttttttttttttttaaaaataagatatatatatatatagtattgtgttaatgtagtggtttttttgttagtaatatagtgtttaataaaggtataataatgggaatagtttaggggtgattaagaagaatgattttaaattttttattttggtgtttaaagttttattgttttatatgtgggttgggtgggagttgaaggagttttattgttgttattttgggatataaagaaaagtagaatattgttgtttgaaagattttagagttgtttattttgatttttttttatttttgtattttaatgttaatttttttaaaatgtttaatattttattttttttaatagttaaaattttgtttttattttttcgttgattttgaaattattaaaattaatagttttgtttttgaaaagtgtttatagttttgtttttgttgttgttaattattttttttattgtagtttaattaataagagattgtattttatttatttagttttttaggatgttgttttaaagaattatttatttaagttaatgtttaatagttttatttttgagagtatattttatggtgatattgaattttagtaattagatatggttattaaatgtagaagatttggcgtttatgatgtagttttataattgtatataattgtattatttattttagaatttttaataagttgtatgtaaataagtatattttaaaattgtgatagaaatttttttatgttgttttaatatttaggaattttaattatatggatagattttatgtttgggtaagaagaaattagaacgttatttattatttatatgatttttattaattaatttttgaggtgtgtagttattattttatatatatttaaagttttttataaataatttggaaaagtattgatagggtttttgtatattttttgtttttttatattataaaatgtagtgcgtaagtgaatttatagaaaaaagatttgaagtaatattattgtaggtagtggtagtaggagagagtagatgtttaggattggtatttgggatgtagttgttaagagtaattgtattttaagcgttagttgtatttggagtagtgttattttttttggtttttttagtaattttttttgttgtttttgtgatttttttggattgtttattttgttgtagttggattttaattgtagagagtattattagagaaaagtttaatttgaaaatagaagtttggatgtaggagttttttgaaatttgtatatgaaaattggggaggattttttaatttatgatttattaaaaagattatagattatgtatgtttgagtttttgatttggtattaaagtttttgggaatatgattgaagaattgagtatttttagataaaatatagtgtagaatttttgatgataagttggaatatatgtaaattttgtttaatatttgttttggtttttgttgttttatgagattgaaggtaaagaatttggaaaaatattgttttgtttttttaggtagttaatattttttaattaagagcggatgtgtagtatagtttttgatatttaaggagttggtaatttaatatatttattttaatatatgtttatcggtatgtatttgttattattttttattaaagattttgtaatttttggagttaggtatgtagttattagtatatgtgataattgatttatatttttttaatttgtggatttaaaattagggagattaatagagaagatgttattttttgtgtattgtgtgttttttgtaagtaatgatagaaaattattaagtaaatagatgttttgagtttttaaaagattgtttttttttagagtttttagtatttttatattattgagttttttttttaatagaaattttatttgtgattttaaaaggatgtatagtataaattttggaagttttgtatttgtggatttattcgggttataaagtgacggggaagtatgtataaagatttgttttagtgaagatggtacgaaagttttgacgagggtttttgatagtttaagaagttttgttttgtttttgatagatttaggagaaatgaattaaaatatttgaaaaattaatatataaatgttaagttttaaaaatttataaattaaggtattgtaatttttatatgatattgtttgatatagaattttaggaagtggttagtcgtttttagatgtttttattaagtggtaattattggtattttaaaatatgattataagatagttgtataatgtggattttatttttagaattattttgtgtttttagtatagacgtaaaataaatttttattaatgtgaataatttttaatttgaaggttaattattaaaagatgaaagtggagattattttttgttatttgtagttatattaggttgatgttttatatgttaatgtttatgggagatattttgaaaaatttggagaataagaattgtggttattagtttaattgtgtttttttatttgtattgattagagttttgttagttatatttttttttttatttttgtttttaatatagttaatattttattatattttatttttagattgtttttattattagttatgagagtagttagggtataaatataatgtttttattttttatattagaattagtagatgtcgtttgatatgtagtgtataaggaggaaatatttgatattggaattgttagaatttttaaggtaagttgtcgtagttttggggagagtgatagtttgaatgtagtagataaataattaatgttttgagtattaaaattgtatgataaatggttttttttttgttaatattatttttttgatttttaaaaaatgagatattaatattatatttatattttttttgtttttttattagggaatagtttataattatgttttttaaatttttttattagtaggtaggggagagtaaaagtttatatttaagttgtttgggatgtagattaaagtattttatttatttagggagtttttttttagttttatattttatttgaaacgttattaatattttattttttatttattgtttttgtttaaatatataaataatgattatatttattatatattaaattatttaaaatttttttagaatatttaagtaggtttaatattgttaggtgattgttgtgtttatgttgtaattttgagaattatcgtttttattttggttgattatgatatgtttgagggaagggattgttttttgtaattttttattttttcgatattaagtatagtgttcggtatagagttgatataaataaatgtgtgtttgtgttggatatgtatttgtttgttttatttgagtatatgtataatgtttaataaatattttataagtaaatgaaatgatagtatgtttatattaggaatatgtgtttatatttttggagagtttttatgtgaaaaaaaaataggtatatatttttggtttttaatttttaaatgttgatttttttagatgtttggattatatgtttataagagtagtgtttttttgaatatagttttttatgtggttattgttaaagagttttatgttttaaaatttttttgtgtttgggatatttagatattttttttggttattttttgtatatttttttgtatttttatatgttttattttagtattttttatttttttaaatttgatgtatatatttattttatgataaatatattttttatgtttgattttgtatttttggtatataaatttatagtggtttattgttttttgtatattgtgatttttgattttgtgaatttatgttttttgaattttaattataggattttttgaggtttggttttaaagtgtatttttttagagaggatttatgtttgattttaattaggtgtttgggattattttaaattgtattttgggttttttgagttacgtagattttggaaattttgattttaatattatgtaagtttaggtttttagttagaatttgttattttttttttttttttttttttagtttatttagatttaaattttgttatttaggtagatttttttattattttttttttttttttttttttatatttttaaagatgttagtatttgaggagttttaaatttatagggagtttttgatttaatttttatttatattggttttagttttgttttttgtttttgtgtatttgggtattttgttttatttttttagttaaaattaatttgaaatttttattaggattggtaggtgtttttagggtaaatacgtagtatgaagagggaggggtttttggtttgtttgaaatttgttttttttttgattttggtttttggagaattttttttttttgtttttcgtaagtgtatgtttttgaaaataatattgtaatattttattttgtatttaggaaaaattggaggagttttttaattatttagtttattggagataataagtttttgagtgtttgttgtgtgtaaggtatattattgatttttatattggaaaatatgagtattttggttagtaatgaaaatgggaatttttgtattattttgattttttatttagattttttagtggtagatattttcgtggtgaataaaatttttagtgtatttgggttttgatttataataaaaagggattggattagttgatttttatggatttttttagttttaaatgttttgtattttatgatttttaaattattatagtgtgttttttttttttatgtttataatgatttagttgacgttttgagtttagttatttatgttttattttggaaaattgtttttttttttttttttatttttatttatttatatttttttttatagttttgttaatttgtatttattttttagtgttttgatttttcgggggatatcgggaataaatgttttttatgtttttttatagg

SEQ ID NO: 156 - DNA, 19634 bp, Artificial Sequence
  chemically treated genomic DNA (Homo sapiens)
tttgtgggggaatatagaagatatttattttcggtgtttttcgaaagattaaagtattaggaaataaatgtagattggtaaaattgtaaaaaaaaatatggataaataaaaatgagagagagagagagaatagttttttagaatgaggtatgggtaattgggtttaggacgttagttgaattattgtaagtataaaaaaagaaaatatattgtagtggtttgagggttatggagtgtagaatatttaggattggaaggatttataaagattagttagtttaatttttttttattatagattagaatttagatatattaaaaattttatttattacgaaaatgtttgttattaggagatttagataaggagttagggtagtgtagaaatttttatttttattgttgattaggatgtttatgttttttagtgtgagggttagtagtgtgttttatatatagtaaatatttaagagtttattgtttttaatggattaaatgattggagggtttttttaattttttttaaatgtaaaataaagtattatagtattatttttaaaggtatatatttacggaaaataagaaagggaaattttttagaggttaaaattaaaaaggaaataaattttaaataggttagagatttttttttttttatgttgcgtgtttgttttaggggtatttgttaattttggtgagggttttaagttagttttagttagaaaaatggggtaaggtgtttaggtgtatagagataggaaatagagttggggttaatgtgggtggggattgggttaaagattttttgtgaatttggaattttttaaatgttgatatttttagaggtgtaaagggaaaaaagagagagagataatgaagaaatttgtttggatgatagggtttgggtttggatgaattgggggaaaaggagggaaaaaaatggtaaattttaattgggagtttgaatttatatggtgttaggattagaatttttaggatttacgtggtttagaaaatttaaaatataatttaaaataattttaggtatttggttaaaattaaatataaattttttttggaagaatgtattttaaaattaggttttaaaaaattttatagttaaaatttaagggatatgggtttataaaattaaaagttataatatgtaagagataatgagttattatgaatttatatgttaaagatatagaattagatataagaagtatatttattataaaataggtatgtatattaaatttaaagaaataggagatattaaaatagaatatgtaaaaatataagaaaatatgtagaaaatagttaaaaagaatgtttagatattttaaatataggaaaattttggagtataaaattttttgataataattatatgaaaaattgtatttaaaaaggtattgtttttataagtatatggtttagatatttaaaaaaattaatatttaaaggttaagaattaaaaatatgtatttattttttttttatatagaggttttttaggaatataaatatatgtttttaatgtaagtatgttattattttatttatttataaaatatttattaagtattgtatatgtatttaaatggggtaaatagatatatatttaatataagtatatatttatttatattaattttatgtcgagtattatgtttggtatcgagaaaatagaaagttataagaagtagtttttttttttaagtatattatagttaattaagatggggacgatggtttttaaagttataatataaatatagtaattatttggtaatattaaatttatttaaatattttggggaaattttaagtaatttaatatgtaataaatgtagttattatttatatatttaaataagaataatgagtagaaggtaaaatgttaataacgttttagataaaatatgagattaaaagaaaattttttgggtggatggaatgttttggtttatattttagataatttgaatataagtttttgtttttttttgtttgttggtaggaaggtttaagaagtatggttataggttattttttggtaaaggggtaggggaaatgtaagtataatgttaatattttattttttaaaagttaaagggatgatgttgataaaagggaaattatttgttatataattttagtatttaaaatattagttgtttatttattatatttaagttgttattttttttagagttacggtaatttgttttggggattttgatagttttaatgttaaatattttttttttatatattatatattagacggtatttattagttttaatatggaaaataaggatattgtatttatgttttgattatttttataattagtagtggagatagtttgaaaatgaggtataatgaggtgttaattatattaaaagtaaaaatgaaaaaaaaaatatggttagtaaagttttagttagtgtagataaagaggtataattgggttgataattataatttttattttttaaattttttagaatgttttttataaatattggtatatgaaatattaatttaatatgattgtaaatgataaaaaataatttttatttttattttttaataattaatttttaaattaaaaattgtttatattgatgaaaatttgttttgcgtttatgttagaggtataaaataattttaaaaatgaggtttatattgtataattgttttatgattatgttttaaaatgttagtaattgttatttaataaagatatttaagaacggttggttattttttaaaattttatattaaatagtattatgtagaaattatagtattttagtttatagatttttgaaatttgatatttgtatattagttttttaaatgttttgatttattttttttaagtttgttaaaaataaaataaaattttttaaattattagaaattttcgttaaggttttcgtgttatttttattaaggtaaatttttgtgtatgttttttcgttattttatagttcgaatgagtttataaatataaggtttttaaagtttatgttatatatttttttgaaattataaataggatttttattaaaaggaaagtttagtaatataaaaatattggagattttgaggagaggtaattttttagaggtttagaatatttatttgtttggtggttttttattattatttgtaaagaatatataatgtataaaagatagtattttttttattaatttttttagttttaaatttatagattgaaaaaatatggattaattattatatatgttagtaattgtatatttaattttaggagttataaagtttttaatgaaaggtaatggtaaatgtatgtcggtggatatgtattaagatgggtgtgttagattattaattttttagatattagaagttgtgttgtatattcgtttttaattagaagatgttaattgtttaagaaagtaaaataatgtttttttaggttttttatttttaattttataagataataaaagttaggataaatgttaagtaagatttatatgtattttaatttattattaggaattttatattgtgttttatttgaggatgtttagttttttagttatatttttaaaagttttagtattaagttaaaagtttaaatatatatgatttgtagtttttttgataaattatgaattaaggaattttttttagtttttatatataaattttaaaaagtttttatatttaggtttttgtttttaaattgaatttttttttgatagtattttttgtagttaggatttagttgtaatagggtaaatagtttagaagggttataagagtaatagagaaagttgttgaaggagttaaagaaagtagtattgttttaaatgtagttagcgtttgggatgtagttgtttttggtaattgtattttaaatgttagttttagatatttatttttttttgttgttattgtttgtagtgatattattttagattttttttttgtaaatttatttacgtattatattttatggtgtgaaagagtaagaaatgtataaaggttttgttagtatttttttaaattatttataggaggttttaaatatgtgtaaagtagtaattgtatattttagaaattaattgataaaaattatatgaataatgagtggcgttttaatttttttttatttaaatatgaaatttatttatgtaattaaaatttttagatattggagtaatatgaaaagatttttattataattttgaaatatatttgtttatatgtagtttattaaaaattttaagatgaatagtgtaattatgtgtaattataaaattgtattatgaacgttagattttttgtatttaatgattatatttgattgttaaaatttaatattattatgaaatatgtttttaggagtaaagttgttaagtattggtttagatgggtagttttttgaagtaatattttgagagattgaatgagtaagatgtaattttttattaattaaattgtaatgggaggaataattaatagtaataaaagtagaattgtaaatattttttagagataagattattaattttgataattttaagattagcgggaaaatagaaataaaattttaattattggggaaaataagatattgagtattttgagaggattggtattagaatatagagatggaaaggaattaaaataaataattttaagattttttaaataataatgttttgtttttttttgtgttttagagtaataataataaagtttttttagtttttatttagtttatatgtggagtagtgaggttttggatattaaagtgaggggtttagggttattttttttgattatttttaaattgtttttattattatgtttttattgaatattgtattattagtaaagagattattgtattagtataatgttatatgtgtgtgtgttttgtttttaagagagaaagagagagaatttataaaatatattgtagttgttgttgggaataatgatgaataaagtaggaattttatttttaagaggtttggaatttatgatagaatttttcgattattttttatttgttattatgtagttagtaagttgttttatatatggaattatttattatagtttattaggtagagaggattgattaatagtttttggtatgtttattgtgattttttttgatttgggatatatttatgtttgtttggagattgtagttgagaattattagtttaataagattggaagataaatataattttatagtattttttagggaaattgttatagatgtttaattaattttataggttgattaaattataaaattttttttgatgtatagttgtattttaagagatatgatttaattttttgtaaatattatttatgttttatttagtttattagattaggataattttgtgattgttagtttgattgtttattaataatgtagtatagttatgatttgtattttaattgaagtatttatttaaattcgtgggatataaggatggtataaaaaggaaagagaatttgaagattatttagaatttatgtttaaatgtattttttgttgtttttgatatatatagtaatttttgtaaagttgtaaaagtttgtttttgtgtaggaaaaaaaaatagtttaggaaggattgttattagttttatatgttattttagttatttagaaaattattaaataaattatttaaagtttggatgggttttttaagtttttttttaaatgataatatagagataatagataaatttttttttataatgataattttaggggtaaaatttatgttattataatatttgtttatttggagatttataagatattggagaatgaatattaagggtttaaaatatttataaaataattttattatattttatattttgaatgtttttttaattaataaaattttattttgaagttatttaaaaaggtttatttttaattatagttaagatgtaattggtttaatttaatgatttagatattttaagtgatattttagatgtttaatatttaagcgatatttagtattttgatagattagtttttattttttttttgttttagtttttttaataaggagtaaggtaatatgtattttttttttaattgtggatgttgatatgatatattatgaaagtttattataaagtggaaaaaaaaaatttataaagtatggaggattttgaaaatataatggaagtttttgtgagtggttttttgagttattttttaaattttgttatagaaagaaattaataaaaaataggtagtttggttaggataatgaaggagtataaatatagttatttgtatggaaatgatacgggtttttatttagttttttattattattggtaagattgaatttagagaaatttaatttggtagttatgagaattataaatatattttagtttttaaatattttgtttttttgttaaatatgtatttatgagatcgtgagttttaaattttggtttagtatttatgttgtttaatttaagatagttattttatatttcgatgagaaattaattcggttagtaagttatatgataataatgattttggggaaagatttagagtgaaattattttttgataaagtaagaaaaaaatgtatcgttttttttagtaattttaagttttatgtttttttaggttttttttaaaaaaaataatataaatagaaagaaatttataaggtaaaatatttaataaaaggtaaaaagtatgttttataagttaagatataattagattttattttttttattgtttaagtttttaatttaaagtaattattaggatttgaggaatttgggttattatagttattttgtgttatattaaatttttgtttatttaaaatgatatgaagaaagagtttatgggtgttttatgaaaattagtaatttatagagattttgttttagttattgttgtattttttagaagttaattgtagataagttaaaaaagattaaaaatgagagtaagacgtgaagtagataatatagagtttataaaatataaattataaagtaaattgtgtttttcgtaaaatttttcggtataaattagtgataatatcgatgggaaaagaaaaaacgaaatagtgttttaagtaaaattttttttttatgaaattgaatttatatgtttaagtatagtgaagtgattagaatatattggtttttataaaataggaaaatttttaattaagtttttgttaattgtattttaggttggtttatattttatataaaaaatttttaagtatatttatttatgtgttgttttttgtttataagtaatttttaaaataagggtattattgttaagaaaatttatttatttgggttgtgaatgataatttattatgttagtggttataggtttaataattagttaggaaaagaataggatgagtatagggtagaatttttaaatggttggagtttttatgtttttggtttttttttgtatttttttattatttttgtttttgtagtattttagggtagtagtgggagatatttttttgagtataagtgggggaataagtttattagagttattgtttattagattgttttgaataagatgattttttgtaaaaggttttaattttggagtgtatgtagattatgatattatggtagtgatatatttcgattagtatttttaaattaaaagtagagaaggagagattttttttattttttatatttatgtatatattgtttgtgtattttttggaatgaaatagagttttggtagttattgttttatagttaaagagaagattttttatttttattaattgatatttagtttgatatgtttatatataataaataattatttatttttaatatatttagattattttatttatatgtgatttttaatgtcgtgggggaaaaatattttgaaagtattaattattaattgtttttattgttttattttttattttttttttttttgtttaagtttgatattacgttttttttattttaaaagtcgtttaagattatttaaaaattaatatatttttttaaaatttgttttgattttataaattttttttttttttatagttttattttgaattaaggtttgttattaattatgatgtttatagtatagtatattttttatatggttaaaaaaatttatttaattataatttaatatgttataatttttattaatttgttaggtgtttattaaaataaaaatgtaaatgaagtaagattagtaatattttgttttaagatataaattatttatgttagattttaaagattttatgtttatttttagtaattataaaattattttaaaatgtaatattttttttaagtttatagtttagtttttaatttttggtattattatgatgtttttagttaattttaaagtgatttggaattttagttttttattttggggttttgatgagtttttaaaaagtagtaatatatttttatttatttttttttttgattaatgatattgatttgtatgattgtgaatttaaattaaaaataaaattatgtatagttaggttattatgattttaataaaattgagaaattatattttaggatagaatttatttgtttttaattaaaattttattattggtagtttgttaaggaaattttttttttgatttaatttttttataaaaggtagttatttttaaattgtatattttgatgcgaattggtttattagatgttttttcgatataaaaaggatttgaattaggaagataatagtaaagataggttttgaagatgggaattgatgaggaaggggttattttgatagaaaaaaagaaaaaagtaatatttttgaatagagttatagatttaataagaatgttttattttaggtagggattaaattaatgattttggttttattaatgaatgttatgaattatttaagtgtatagatagataatattgaaaattattataaatttataaatggaaagtattttgttttaagaataagattgatatagtgattatattttgcgttttatggaagtttatgaaaagtatttatatttattttgtaaataaaaaaagattttttatatttgacgttgtagtaattttatttttaattttattttgaaattttggatgagattattttttttggtataaagagtattattttaattaggatatttaagagttagttttggtaataaggttgagtttattattggattttggtaggttaatttatgggaagtgaaatgataggcgtatttttggaggatggagtagaagtgtagaggtagagataaattgtattgtatagttgtttttttattttttttttataatttatattttagatataggtttatgtgtttttaatgggatattgttaaaaggttgtcgtatataagacgaatgttattaaaggtgtaaaaattgtattaaggtttatgtagtttaaatatgaaagtaaaggtagatttttatttatttagttttcggtaaatttataagtttatatttgttttatttttgtagatatatttgtttttttgtttttgtggaaggatattttgttgatatggtaggatattttgggagtttttaggagtttagaataaatttttattttgattatgtgtttgagagattaatttaatttttgagaaagtttatttatcgtgttttttttttttcgattttataatggagtttaaagtatcgtttttgtttatttttttttttaggttttttaaggttaagttaaataatttgtatatgttttgatttttttagaagaaaaggatttaatttaatatattgttattatattgttaaataagttatttatttaaataaaatgtttaattttgacgtatttagtgtttttatagttaataaggattaattgtaaagtagagatagatattttaggtattggtataaattttatattttaaaagaaatttttagaattgaattatttgttgaattattttgttaattattattatggattttttattttgggaaagttaaaggaaataaaaaagtaagaattaaaagatttttatatttgtaattttttattatggatttaggttgtataggtatttatgaaatttatgaagattaatagtaagaatgtaattgaaaagaattagagggagtatagttttttttttaatttttttatttttggttataataagtataattgtgatttgatttattttagtgttatttttgagtttttacgatgttttgtttaaatttttattataatatttattatggtgtagaatattattttatttttttgtaattttaatggtagtggtttatttatgatatttatttttggaaatttttttttttttttttgtattgtttttttttgtttatttttaatagtatttcgtatagaagaaaagttaggtaaatatttgataaattaatgaatggtgaataaatgaacgaatgatgatatttatggaaaaggattatagaaaataataaattatttaaattgttttttaattagttattgggtgttgttgttttatatataatttttaaaagttgaatgttagataatatttatagaagggaagttaaaaaattaatttttttatttatattttattgataagttttagaaaaggatatatttttattatgattaatggaaaaggaaattatttggattttttatttgaatattataaaattttttttttttgtggaagatttaaatttagttaattttattatatattatttagaaatggagttataaataaaagtgtattttaagaaatatttttttttttgttagagttattagttaaatatttttatttgtatgggaatatataaaatgattattaaaagattaatgggaagttataaaatatttgtttagtattatttttatatattgagtatattttttttaagaatattattagtaattttaaaattgtttataaaatagtaagtttttatttaaaagttcggtagaatatttaatgattaatttattttttaaagaaaatttattatatgttatgataaatgttttattatttgaatataggcgttttagggaaatttgtgtagatttagatagttgtatggtattgttatttttaatttttaaaaatttttttttttttgttagtgttagttataatttaaggtaatgaaagagttatttgttttatttaatttaaaattagtattgttaaagttattggagaagttggttttttttattagaaaagattttagatttgttataaattatttttagattagaggttatggtaagatatgttttttttattttttttttatttttgtgtaggagttttattttagtaaaataaaaatatagttagatttggggttattttattataattatttgaagttttttgttttataatattttatgaaggtgtgggttttttaaattaaagagaatttcgattatttaaaatttttaattaatgtttaaatagattttaatttgttatttgggatttcggttagatgatattttgattttgatttttattaaataatgagtaaagatttattttagttgttatatttgatgtttgaattatttgaattttttttttttttttttgagatagggttttattttgttatttaggttggaatgtagtggtatgattatggattattgtagttttaatttttaaggttttagaaatttttttattttagttttttgaatggttgggattataggtatgtattattatatttcgttaatttttgtattttttgtaaagatggagtttcgttttgttggttaggttgattttgaatttttgggtttaagtaatttgtttgtataggttttttaaagtgttgagattataggggtgtgttattatatttggtttaaattatttggttttaaatatttgttagatttttaagtgaatggtaggtatggtagagaatttttttgttatttttttattgtaatttatatttatatatatttttattttttttaatatatataaaagtatattatatatataagttttgttttgagtatagttttttttttgtggttaagtaataaattattttaaattgatgtgtttaggaggacggttatgatttatttaaattttttttttttttatttggtattttttattattttatttgtttttcgattttatgagatttattattaggttataaagatgttataattttggaatagaaagggaaaagttattaattataatagtttttagaatatttttatttacggtaatattaaatattataaaatttttttttttataatagattttggaagttgggtgttatttttaagttttaggttaataaattaaaatagaaagaggagttgaatgaaaattagaaaaagtatagtttttatttaagaagtattttatatttttttatataaatttaaattttttttaaaattttacgattttttttagattatgttaacgtttaagttgtataggagaaagaattgtggtagaaaagaaaaataaagtaaaagagaagttgggagagaaaaattataaaatttaattataatttattgagaataaaatttaaaattaattacgaaaaaattaaaaataaaaatattgaaaaaggttaaatattttattggaaaatggtgaatgttatattataaatttataagaaggtattatatatagttaaagaaaggaaaaatagttaagaaataaaataagaaagtaataagtgaaggaatggtaaaatttagaaatatgaaagtagataagatgttaaaaaatttttaaaagttttgaggttagaggtaaaattttggaaggggatttggagaaagtttgaataaatgtaatgtatttgtaatgttttttattaatttaatatattttatgattttaagaatataaaatttaatttatataattttttggttattaaagttattatgttaggtaaattaaaaagtatagttgttttagattattgtaatttaaaaaattttaattaattattaattgtagaatttattgatagtttatgagaaataaaagaagttatatattttattatataataaatgatgtttacgggtttttatttttttttgtttagtggattaaaaaaagaaaaaattttttagatgttaaggagcggaaaggaaaagaaaatatttattggataaagtttgtgttttatataggttggtttaattagtaaatataaatatgaagtattgagattaagggtttggtggttattgattaggtatatatgtttaggatagtttttgagttttaaattttatttttaaaatgagggagttggattagaatattatttatgtttgatttaatatgattgtttaaaagttattgtaagttgggcgtggtggtttacgtttgtaattttagaattttgggacgtagaggtgggtagattataaggttaggagattaagattattttggttaatatggtgaaagtttatttttattaaaaatataaaaaaaattagtcgggtgtggtgatacgtattcgtagttttagttatttgggaggttgaggtagaatagtttgaatttttgaagtagaggttgtagtgagttgagatcgtgttattgtattttagtttggtgatagagtaagatttcgttttaaaaaaaaaaaaaaaaaaaaagttattgtagtggatgttgtggttttttatttagatagttttttttaaagttttttaagaatgaagtattgatttttttagttgttggggttattggttgatagtgtttagttgtatttttttttaggaattgtttttgattaaagagatttatttaatttaaggttatattttattttgggagtaggtttgtatttaatgttttatatttaatgattggtttataaagagatgtaaaggttgagtttttttgttttaatttgggatatggttgtatggttattttagttttaaagtttttaatggtgttagttgaggtttttgtggtaattgtattatagtttaatttttttttttgttcgtttaattttgtttttttttttttttaataggttgaatttgagagtataatttaataaatttgatgttttaataaatttatattttagggtttgtttttgtaggaatttaacgtaggagaaattttaaatattttttatttttgtgaaaatattagtgttttttggagatatatttttattttgagatttggattgtagtttttgtttttagtaattaggaattatgaagttagtaatattgtttaataattatttttataaattattttaaaattattttagagtaataaggattaggtagaaatatagaaatgttatatattaagatgtttatttattattttaatagtaaaaatgtatattatattgtaattttaaaaaataaatgagtgaattttttaagtttttgattttttaagaaaaataaatgttagtattaataattgaaaaatagagaaagttattaggatggggaaaagttaagtaaaaatatagaaagtaaaagattttattaataataagaggtaaaaaataaagtatttttaaggaggagttgattaaattaaaaagtgaaatataaatgaaagaaagtattatatttgtataaatttagaattacggaaaaagaaaattaaaataagtatataataaatgttattgtttaaaatgtttatattttattaaattaattaaagtttttataattttttttgaatttgatattttttttttttaaggtgtttttttaagaattttggtgtttttatttttttttttttaattttttttttttgttttattgtttttttttttagtgtatatagatttttatatgtttagtatatttttagtgagataagttaatatatttttttgttattgaggtattttttttgttcgttttatatttttgttttttttttgtataagttaattttttttgataaaaaaaaaaaaagaaaaaaagaaatttgaaattgattttgaagaggtagtttggtaaatagatatatattttttaatatgagtttaattggtttttttataatttaaaaatgaattgtttattaaataaagtagatgttttagagatacgttaagtttggtaataggagaaattatggacgttgttaaagtagtaatagttgattttatagttatggaatgattttgtatttgatttttgttaagataatagagggttttatttattgtttttagttttggttcgtttaagtaggtattgttttttgtttatttattttttagttttaggtttggaataatgttgaatatagtgttataggttttggtgttagataggattaggggttgcggaatatttatagtttttttttttttgtttttataaatgaaatggatagtttgaatggagaaaattaagggttagttggttaaaaatataattggtagtaaaatagttgggttttttttaagagttggtgtttaaagagaggttatttaaagagtaaagtttatttattataatagtgggttaggatattagttgtaggatgaaataatgtaattttatttaaaatgatttttgtttttaaagtttggaaattagatgtgtttttttttttttaagaaattttttagttttagggttaattttttaaaatagttaatttttttatttataataaataataaatgtataattttgagaatgttaaataaattatgtgttacgttggttaaagttttatttttgtttaagtttacgtaaatatataaaaataaaattaagaaatcgagatgggaaaagataggaataaaaaatgatttaagaatttagatgggatagtatggaagatagttagatatttaaattaatttgagaggttattaatatattatgaggttaattgataaatataatttttttttttttttttttttaataaaatgttattttaattttgttgtttaagaaaaaatgtaataatttttttgggggaaaatttatattgaagtatttggtaattagtatataaatgttaatgtttttttttttttttttgtaggttttgatgatgataattttaggttggttatttatttaattttaaaatttttgataagtgttaaattagaaatacgtataatattatatttagggagatagatttatattttaaataattttgtatattgtgagattattttttttttatagtttaggagtagatgaatttgaaggtgatttcgcgaagttgtttttttttgtatatatatatatgtataaatgattggaaagagaaatgaaagagggttttagataaaaaggaaaggcgtttagttagataggtgtatttagtagtagttttttgatgttataatttcgaaaatagataaagttattagtttgagagtttttggaaggtattatttttatatagggtacgattttgtaggagaagttttttagtagttattttttggttagttcgtggaagatgattagcggaaggtagaagaagatgatgagaaagttttagaaggttaggttggttaagagggagttggagatgtttcgtatgtagtagttgtggtatacgatgtatattatcgttaggttgttaatgatgtcggtttcgaagattattacggatagatatatgatcgcgtaggttttataggatttttgggttagcgggtagaaggggttttttagttttatacgtcggttcgtgttgttttttcggcggggatttttaggtttatggatttttttatttaaggatttattttgggttagcgttcggttcgggagtgtaattgtttatttttcgtgtttcgttagtttattggtcgttttggataggggtttgtggtgggaattttggagtttttcggttttttttggttagtaaaaaagatcgttggtttcggggattgtttttatattttgtttttggttacgttcggaaatgttagcgtttttgggattttttttttttttttttgagatttgaaggaagagttggagggtcgtggggttttttttttttaaagttttagaaggtttttgatttcgagtatttttttatttttaggggttaggtggtttggttggaggtttcgggggttcggttgtcgacgttttcgtttttttgtttgtagtcgggttacggttcggggtcgtcggtaggttttaggagggtttcgtaagaaacgttgttttttgtttttttttgggtgttcgggttcgtagaacgttttttgtagaatttttcggtttttaggcgtttttgtcgcggcgttggattattgtaggtgtatagtttttttttagataagtttcgtttttggacgtaggggcgatttcgagggtagaagaggtagatattttgagtagtagtagaagtagtagtcgcgatatgcgggcgagaagcgcgttcggggttcgtatggtttggtgagggtatattcggtagtcgtagtttttgtttagttaggatcgatatttgttgtcgaagttgttgttgagagttaggtatatgttatatatttattttcgttcgggtagcggggaatcggagattagggtgatagcggaagatcggttttgggggttatatatacgttttttataatttttttttttttggtattttgtgtattttttagttaagttgagttttagtaaggtatgttttttaaggtttttagagggaataggttattttcggtggttgattttgaaaagttgtaattaatatttgattgttgattattgttgagattcgggggagtttagacgaagttttatattttttattgtttttgggtgggggtggtggtttttttggtaatagttgttttgtttatttatattttttcgatagcgtttgatttagttgtaagtcgaggtttttagaggaaaagaaaaataagttttttttttttagacgattcgtagttataatttcgtttttagttcgttggaaatacgttgtaaatagttcgaagtagcgttgatgcgtcggcgaaatttttgttttatttaattttagcgatttgcgagtttattgttgtcgaggagaagcgggattttaatttcgcggttattgttaaagttgttttttttttagtttaaagttgacgacggggcgaagtaggttgttggacggcgtgtcgtcgtagagaaggaaatcgtggggagaagggggagaagagggcgtcgttcgtcggtggatagtgtcgttagtcgcgggagttagttattgttatagcgggtttagttcggacgggaagggtggtgtttggaatcgtcgcgggttaggtagtgcgcggtcgggaaggggaggtggttcggtttcgttttcgcgttttagtcgttgcgcgcgttcgcgaagttcgattttcggttcgttgtttttttttattttttcgtttttttttcggagagatattggtttgtggggagacgggattttttggtggtttattatttattaaatttatatacgttttatttaagttatttgtagcggtttttattcggaggagttgggagggaataagggcggaggcgcggagtttgcgcggttcgaggttagggatgggcgggataggttaattttttagttgtcgaaattagtttgataggttttcgagttcgggttaggggcgggtgcggggcgggagtggggggtgggggtgggaacgggaatatgagagcggtcgggggagggaagagaggagggtagtaggggagtgagtagtagggttttttttaatttgttgcggttgatgcgtatgtttaggttttagttttggggggcgaggggcggggcgggggaggggcggacgggggttgggtcgcggggagtaagaaggtgaaattttatttttttaggtattttttagagataggagagaatgggagtttagaggtgttagttatagagaattattagttttaggattgagatgtagagcgagaaagtttaggatgtattattatttttaatattgagttgggaagtattttattatgggttatttcgtattatttagagtatagtgaggtagttgtatttgatgaagtagtgggaaatgattggaggtagaaaattattcgaatagtatttttagtacggttgtttatgtttttttaatttttttattatattttataattttgttaaaattgttagggtatagttaataaaatagataaattaatgaagagaaaatgatagaggaagaaataaatatattttgaattttttttttaaatagagttttgttgtgtcgtttaggttggagtgtagtggtgcgatttcgatttattgtaattttcgttttttcgggtttaagcgatttttttgttttagttttttaagtagttgagattataggtattcgttattatgttcggttaattttttttgtatttttagtaga

SEQ ID NO: 157 - DNA, 3128 bp, Artificial Sequence
  chemically treated genomic DNA (Homo sapiens)
gaggggagttttggcgcgttagaattagttgcgttcgtcgagagttttttgtgggtggggagagttttttatttttttgttcgtttgagcgtttagagtttagggtcgtcgatcgtagtatttttcgatttgttgtatcgaggttcgcggtttttgtgtgcggtttttatcgttgttggaggcggtcgtaggcgaatcgtcgggtcgttagttacgattcgagttaggtattttttcgtttttgggatcggggtcgaaggttaattatattgtagttaggttttgcgattggacggtagtgagagtcgattggtcgtcgtcgcgagtttcgggtttttttttttttttttttgttttaattttagcgtttaagttttaggttaatgagatagcgttttatagacgtttttttttcgtttttttttttttattttggagagggaggggaagttttgattggttagattgttttcggaagtttttttttttttattaattatcgaaggaggtacgtttttagcggagttttttagttaattataaagcggcggcggcgtttagtcgtgtagttttattagcgtttttgggttttatcgtttttaattttttaagttttttcgtaagggtcggcgattttgattggttattgttgttattgtcgaatgttttttttagttagttatcgaataaggcgaatttatttttttcgttcggttattttcggtatttttcgttttttgggcgtggttttttagcgttattttttaattggttttttaggttgatcggtttttttcgggaggagtcgtaaataaacgacgttcgtgattggtttcgttcggatttcggtttttagtcgaagcgggcgagcgtggggttcggtcggcgatttttagacgtttgttacgcgggcggcggggcgttgggcggtgtaaggttgggtgggggaggaaggaggtggaggacgagtaggaggggggaggaggagtggggaagtgtaaggcgcgtcggtagatagcgttttttatatagagtagtttttgattcgggcgaatgcgggttttgtgtcgtcgtcgtcgtcgtcgtcgttcgggttaagtgataaaggaaggaaggaagcgaggaggagtcggtttcgtagtcgttgatagggttttgggttggggtaaagcgcggatattttttgagcgggtatcgagtagagtcgaggggcgggagggcggtcgagttgttgtcgcggacgggggagggggtttcgagggacggaagcggttgtcgggtttttatgttttcggcgaatggggaatagtcgaggagtcgttgtttggggtttgaagggagttgttttcgttatcgttatggtcgttggatttagtcgtcgtttgtagttgtttttggcgtaatgaggagaggagtcgtcgttatcgttatcgttcgtttttgattgattcgcgatttcgtcgttttttagttcgtcgggtttttgtcgttagttcgtcggatttcgcggtttgtcggagttgtagcgtttttcgtcgtattttcgagttatttttttttttttttttttttttttttatttatttttttttttttttaagcgtgagattcgtgattttttcgtcgttttttttttttattgattcggaaaaaaaattttcgaggaaaatataatattcgaagtatttatttttaattaagtatttgttttcgttttacgtgatatatatttttttaggatttgtttttttttttttttttttttaggaaagggaggggaaagaattgtatttttttttaagttttaaattatttatatgttaaatattcgtgtcgatttgttttgaaggagaaatatatcgtttgttttgttttttatagtatataaaaggagtgaaaagttaagaggacgaagttttttttttttttttttgtgggagaatttaatgttgtatttatcgttaatttaatattttaatataaagataaaaggaagaaaaggaggaaggaaggaaaaggtgattcgcgaagagagtgattatgttagggcggtttagaattattttttttgcggagagttgtaagtcggtgtagtagtttttagtttttggtagtatgaaagttagtagtgagtattggttttattttatattttttttttatttcgtttttaaaataagaaatttcgaaatattaggatttgaaattattagattttttgataaataggtaatggaaaagggtaaaatttatttttagttaaggatgaagtagttttttttttattttttttatattttttttttcggttttattaattttgaattgagataatatgatatttatttggatgattcgattttaaattgtttttttgtattttttttgttgttggtagttagttttattaagtgttcgagtgtttttacgttaaagtagtgatgatagtgtttatttgtttattttttagaataaagagaaggataagatttgattattaaattattatgtatatttgtagaatttttggaatttggaatgagagaatattttaggttttaggggttattatagtttgatatatttaatagagacgttaaatgttttatttttttaatattttttttttgtttgtatgattatatataatatttgtttttaatttgtggatgaatttttttagtaattatttatatttggaggttgttattgatttttttttttagaagggattagtgggagttaataaatatttagtagtagtaatatttttgtatgtatttgtgtttaattggataagtggtttgatgtgttattttttaatttttttgttttgatattattaatttgttatcgtataatttatgtttaattaaaagttaatttggaagtattaataggtttaagttttgattgagatttgttttgttatagtgttaaatattaagttaaatgttgttattggtttattatatttaagtttaattttggagtgttattgtatttattatttgttaaatgttttggcgggttttttaaaaaggacgatttaaaatattttagcgttagtttttattatatttagataattgtggatttagttagaagaatgtggatttagttttttt

SEQ ID NO: 158 - DNA, 3128 bp, Artificial Sequence
  chemically treated genomic DNA (Homo sapiens)
gaaaggattaaatttatatttttttaattaaatttatagttatttaaatatgatggaaattaacgttagagtgttttaaatcgttttttttaaggaattcgttagaatatttaataggtaatgaatgtagtagtattttaaaattgaatttaaatgtaatgagttagtgataatatttaatttagtatttggtattatgataaaataaattttaattaaaatttggatttattaatatttttaagttaatttttgattaaatataaattatacggtggtaggttggtaatgttaaaataggaaggttaagagataatatattaaattatttatttaattgaatataaatgtatatagagatgttattgttgttaggtatttattggtttttattagttttttttaaagagagaaattaatggtagtttttaaatgtgaatggttattgaggaagtttatttatagattaagaataaatattatgtgtagttatataaataagaaaaaaatgttgggagggtgggatatttaacgtttttattaagtatattaaattatgataatttttgagatttaaaatatttttttattttaaattttaaaaattttgtaaatgtgtataatggtttagtaattaaattttgtttttttttttattttaaaggatgggtaagtaaatattgttattattattttaacgtggaaatattcgagtatttgatgaaattgattattaatagtaagaaaagtataagaaagtagtttgaaatcgaattatttaaataaatattatattattttaatttaaggttaatgagatcgggggagggggtatgggaggagtaaaaagggagttgttttatttttgattgaagataggttttgtttttttttattgtttgtttattaggaggtttaataattttagattttggtatttcgaggttttttattttaagggcgaggtggaaaaggggtgtaaaataaaattaatatttattgttaatttttatgttgttaaaagttgaaggttgttgtatcggtttgtagtttttcgtaaaggaggtggttttgggtcgttttgatatgattatttttttcgcgaattattttttttttttttttttttttttttttttttgtttttatgttggggtgttaggttaacgataaatgtagtattaagtttttttatagaagaaaaagaaaaagatttcgtttttttggttttttattttttttgtatattataaaaaataaaataagcgatatattttttttttaagatagatcggtacggatatttaatatatagatgatttaggatttgggaaaaaatataattttttttttttttttttttgggaggagagaaaagagagggtaaattttaaaaaaatatgtattacgtgaaacgggggtaaatatttgattgaaaatgagtatttcgaatattatatttttttcggggatttttttttcgagttaatgaagaagggaagcggcggaaggattacgagttttacgtttgaagagaaagggggatgggtaggagggagggagagggagggagggggtggttcggagatgcgacgggaaacgttgtagtttcggtaagtcgcgggattcggcgggttgacggtaggggttcggcgaattagagggcggcggagtcgcgagttagttagaggcgggcggtggcggtggcggcggtttttttttttattgcgttaggagtagttgtaggcggcggttggatttagcggttatggcggtggcggaggtagttttttttagattttaggtagcggtttttcgattgttttttattcgtcggggatatgggaattcggtaatcgttttcgtttttcggggttttttttttcgttcgcggtaatagttcggtcgttttttcgtttttcggttttgttcggtgttcgtttaggaagtgttcgcgttttgttttagtttagagttttgttagcggttgcggggtcggttttttttcgttttttttttttttttgttatttggttcgggcggcggcggcggcggcggcggtataaagttcgtattcgttcgggttaggagttgttttgtgtgaggagcgttgtttgtcgacgcgttttgtatttttttattttttttttttttttttattcgttttttatttttttttttttttatttagttttatatcgtttagcgtttcgtcgttcgcgtaataggcgtttgggaatcgtcggtcgagttttacgttcgttcgtttcggttgggagtcgaagttcgaacggagttaattacggacgtcgtttgtttgcggtttttttcggaaaaagtcgattagtttgagaaattaattagaaagtgacgttgggaagttacgtttaaagagcggaaaatgtcgaaggtagtcgaacggaaagggtgaattcgttttgttcggtggttggttggaggagatattcgataatggtaatagtggttaattagagtcgtcggtttttacgaagaggtttgaagagttgaggacggtgaaatttagagacgttggtgaaattgtacggttgggcgtcgtcgtcgttttgtgattggttggaaaatttcgttgggagcgtatttttttcggtgattggtgaagagaagggggttttcgaggatagtttggttagttaggattttttttttttttttaaggtggggagaagaaagcgaagggagggcgtttataaagcgttgttttattggtttgaagtttaggcgttggagttggggtaaaagggagagggagggagttcgaaattcgcggcggcggttaatcggtttttattgtcgtttaatcgtaagatttagttgtagtgtgattggttttcggtttcggttttaggagcggggagatgtttgattcgggtcgtggttgacgattcgacggttcgtttgcggtcgtttttaataacggtggaaatcgtatatagggatcgcgggtttcggtgtagtaaatcggaaagtgttgcggtcggcggttttgggttttgagcgtttaagcgagtagaggggtggagggttttttttatttataggaggttttcggcgggcgtagttaattttgacgcgttaaggtttttttt

SEQ ID NO: 159 - DNA, 3030 bp, Artificial Sequence
  chemically treated genomic DNA (Homo sapiens)
tttttgaaaattgttaataaaaattcgttggttttacggtttagggggtattacggaatttgcggatatgtgatgttttttttggatattcggttttaaaatgttttttttttgtattttttttttttattttttaggttagtcgatatttagggaaaataggaaaggatttacgtgaaatattgggggttgaatttttttcgataataagttttttaaaaaagatttttaaatgaaatttttttgttttttaatttttatttttgttttgggggtatatgtgaaggtttgttatataagtaaattcgtgttttcggtgtttgttgtatagaatattttattatttaggtattatgtcgagtatttaatagtttttttttttgtttttttttttttttttattttgtattttggagttaattatagtgtttgttgtttttttgtttgtgttataagtttttattatttagtttttatttataagtgagaatatttagtatttggatttttgtttttgtattagtttgttaaggataatagtttttagttttatttatgttttataaaagatatgatttagttttttttaatggttgtattaaatgaagttttaaagatataatataaatattaattttttttttattataaaaattttttgttgaatttgattatatttaaattaacgagttttgttttatgaaagattttttggataaatttgatagttgatggaataggagaagttgtttgttatgtttaaagttaataagagattaatatttagaataaatggagatttgtaaattaatagaaagtaggtagtaaagttaaagaaaatagtttaaggtatagttattaaaaggaacgtgattatgttttttgtagggatatgggtggagttggaagtcgttagttttagtaaatttatataggaatagaaaattagcgagatcgtatggttttatttataagtgggagttgaataatgagaatatatggttatatggcggcgattaatatatattggtgtttgttgagcggggtgttggggagggagagtattaggaagaatagttaagggatattgggtttaatatttgggtgatgggatgatttgtatagtaaattattatggcgtatatatttatgtaataaatttgtatattttttatatgtattttagaattttaaataaaagttggacggttaggcgtggtggtttacgtttgtaattttagtatttttgggaagtcgaggcgtgtagattatttaaggttaggagttcgagattagttcggttaatatggtgaaatttcgtttttattaaaaatataaaaattagttagatgtggtacgttatttataattttatttattcgggaggttgaagtagaattgtttgaattcgagagcggaggttgtagtgagtcgtcgagatcgcgttattgtattttagtttgggttatagcgtgagattacgttataaaataaaataaaataatataaaataaaataaaataaaataaaataaaataaaataaaataaaataaaataaaaaaataaaataaaataaaataaaataaaataaagtaatttttttttttttaagcggtttttattttttttttttgttttgtgaagcgggtgtgtaagtttcgggatcgtagcggttttagggaattttttttcgcgatgtttcggcgcgttagttcgttgcgtatatttcgttgcggttttttttttgttgtttgtttattttttaggtttcgttgggatttgggaaagagggaaaggttttttcggttagttgcgcggcgatttcggggattttagggcgtttttttgcggtcgacgttcggggtgtagcggtcgtcggggttggggtcggcgggagttcgcgggattttttagaagagcggtcggcgtcgtgatttagtattggggcggagcggggcgggattatttttataaggttcggaggtcgcgaggtttcgttggagtttcgtcgtcgtagttttcgttattagtgagtacgcgcggttcgcgttttcggggatggggtttagagtttttagtatggggttaattcgtagtattaggttcgggttttcggtaggtttttcgtttatttcgagattcgggacgggggtttaggggatttaggacgtttttagtgtcgttagcggtttttagggggttcggagcgtttcggggagggatgggatttcgggggcggggagggggggtagattgcgtttatcgcgttttggtattttttttcgggttttagtaaatttttttttgttcgttgtagtgtcgttttatatcgtggtttattttttagttcgaggtaggagtatgtgtttggtagggaagggaggtaggggttggggttgtagtttatagtttttcgtttattcggagagattcgaatttttttattttttcgtcgtgtggtttttatttcgggttttttttttgtttttcgtttttttcgttatgtttgtttttcgttttagtgttgtgtgaaattttcggaggaatttgtttttttgttttttttttgtatttttgattttttttcgggttgttgcgaggcggagtcggttcggtttttatatttcgtattttttttttttcgtagtcgcggttttgcgtatgttgttggtagattagggttagagttggaaggaggaggtggtgatcgtggagacgtggtaggagggtttatttaaagttttttgcgtaagtgattatgttcgggtaaggggagggggtgttgggttttagggggttgtgattaggatcgggggacgtttaagtttagtgtttttttttgagttatgttttttttaatagttatacgggtagttttttaagttttaggacggagattttattttgtattagtttaatattattttgcgttatttgggtcgtatttttggtgagttttgaatttttaagtttagggtaggtatgggtaagtttttgttttcggagtttttttgtttaaattagttgtt

SEQ ID NO: 160 - DNA, 3030 bp, Artificial Sequence
  chemically treated genomic DNA (Homo sapiens)
ggtagttgatttaaataaaagggtttcgggggtagaggtttgtttatgtttgttttggatttggaggtttaagatttattaagggtgcggtttaggtgacgtaggatggtattggattggtatagggtgaggttttcgttttggaatttggggagttgttcgtatagttgttgggggaggtatggtttagggaggggtattgagtttgggcgtttttcgattttagttatagttttttaaggtttagtattttttttttttgttcgggtatggttatttacgtaggaggttttgagtgagtttttttgttacgtttttacggttattattttttttttttagttttggttttgatttgttagtagtatgcgtagggtcgcggttgcggggagggagaagtacgagatgtggggatcgggtcgatttcgtttcgtagtaattcggggaggggttaggagtgtagggagggaatagggaaataggttttttcgaagattttatataatattggggcggggagtaggtatggcgggagaggcggggaataggaaggaggttcggggtaaaagttatacgacggagggataagggggttcggattttttcgggtgggcgaggggttgtgggttgtagttttagtttttgttttttttttttgttagatatatgtttttatttcgaattgggaaatagattacggtgtagggcggtattgtagcgaataaagaaaagtttgttggagttcgggggaggatgttaaggcgcggtgagcgtagtttgtttttttttttcgttttcggggttttattttttttcgaggcgtttcgggttttttgaaagtcgttaacggtattggggacgttttgggttttttaggttttcgtttcgggtttcgaggtgggcgaggagtttgtcgggagttcgggtttgatgttgcgggttggttttatgttgggagttttgagttttattttcggggacgcgggtcgcgcgtatttattggtggcgaagattgcggcggcgaaattttagcgaagtttcgcggttttcgagttttataagggtggtttcgtttcgtttcgttttagtgttgagttacggcgtcggtcgtttttttggagggtttcgcggattttcgtcggttttagtttcggcggtcgttgtatttcgggcgtcggtcgtagaggggcgttttggagttttcggagtcgtcgcgtagttggtcggggaagttttttttttttttttaggttttagcggggtttagggagtaaatagatagtaggaagaggatcgtagcgaagtgtgcgtagcgaattggcgcgtcgggatatcgcggggggaaattttttaagatcgttgcgatttcggagtttgtatattcgttttatagggtaggggagaggggtggaggtcgtttagaggaaaggaaattgttttattttattttattttattttattttatttttttattttattttattttattttattttattttattttattttattttattttgtgttattttattttattttatgacgtagttttacgttgtggtttaggttggagtgtagtggcgcgatttcggcggtttattgtaattttcgttttcgggtttaagtaattttgttttagtttttcgagtaggtggaattataggtggcgtgttatatttggttgatttttgtatttttagtagagacggggttttattatgttggtcgggttggtttcgaatttttgattttaggtgatttgtacgtttcggttttttaagagtgttgggattataggcgtgagttattacgtttggtcgtttaatttttatttgaagttttggggtatatgtagaggatgtgtaggtttgttatataggtgtgtgcgttatgatggtttgttgtatagattattttattatttaggtattaagtttagtattttttagttattttttttggtattttttttttttagtatttcgtttaataggtattagtgtgtgttgatcgtcgttatgtgattatgtgtttttattgtttagtttttatttataagtgagattatgcggtttcgttggttttttgtttttgtgtgagtttgttgaggttaacggtttttagttttatttatgtttttgtaaaggatatgattacgttttttttagtggttgtgttttaggttattttttttggttttgttgtttattttttgttgatttgtagatttttatttattttagatattgattttttgttggttttagatatgatagatagttttttttattttattaattgttaagtttgtttaaggagttttttatgaaataaaattcgttaatttaagtgtaattaaatttagtaagggatttttgtggtggggaagaggttggtgtttatgttgtatttttaaaattttatttaatgtagttattaaaaagaattagattatgttttttgtgggatatggatggagttagaggttattatttttagtaaattaatgtaggaatagaaatttaaatattggatgtttttatttgtaagtgggagttaaatgatgagaatttataatataaataaggaaataatagatattgtggttgattttagggtgtaggatgggaggaaggagaggagtagaaaagagaattattgggtattcggtataatatttgggtgatgaaatattttgtataataaatatcgaagatacgagtttatttatgtaataaatttttatatgtatttttaaaatagaaataaaagttaaaaaataaagaaattttatttaaaagttttttttaagagatttattatcgggggaaatttagtttttaatattttacgtgggtttttttttattttttttaagtgtcggttggtttgagaaataaagggaaagagtataaaagagagatattttaaagtcgggtgtttaggggagatattatatgttcgtaggtttcgtgatgttttttgagtcgtaaaattagcgagtttttattagtaatttttaaaga

SEQ ID NO: 161 - DNA, 1631 bp, Artificial Sequence
  chemically treated genomic DNA (Homo sapiens)
ggatttagaatatggggcggatttaggtagcggcgggaattaggcggattcgtttggatcgaagttttcgttaggtatcgaagtcgtgaagtcgtttgcgtagtaaagggagttttcggggggcgttcgagattttggtgtcgttcgggggtcgttggtagtcgcgttcgttgtttttcgttcggtgatttagtcggtatttttggcggggttatgggggttagaggatagcgcggggggcggcgagcgcggttgttaagttttttaaggtttcggagggataggatttgggcgtattttatcggttgttatggtaacgtagcgttttagtttttcgcgtttcgcggtggagggaggcgtagttaatcggaagcggcggagttttcggggattttttttttttcgttttacgtcgtgtgtgggcgggggttaggaggtgcggggcggaggcggagcgtgggtcgcggagattcggcgttcgtaggaggtttggtgcgcggcggggttgtacggggttattttcggagtagtattgcgagtagcggcgcgatagtgcggggtttttttttttttagaagagacgttatttatataaatttgatttttacgtggggcgcgggattttgcggggttttagtcgtaggcgtttttgttgtttttttcgggcgggtgggttggagaagaagtttacgcgggattttttaaaacggcgtatagggggattttagggttttatggttatttttttggatttttcggaggcgttgtttagttatttttagtcgttttgatgattcgtcgtgggtttttttaggagattcgaaagtttagggcgggttgtgtgggtaatatttttgtttaggttttcggagggttttacgtggttgtttttggagtattttagagcgttagggttgcgggaaggggcgggtgtgtttttggaaatatgagcgtttgttagtattagtgtttggatagggttggggataaattagtttatgtcgcgtatatcgaatttatgcgtttgagtgagggtgggtgtgttggggagtgcgtttaagtggatagtgtcgtatagtaatgtttacggggagttttaggagagttcggttatttttgcgtaggataattttttttttattattcgagtttcgtgttcgcgggtaggattttttcgaattggggttgtgtgtttagaaatacgtatatgggagcgtttagtttaaagttttagggtttttgggattcgcgtgttcggggtcggggttttaggtgggtataggtgggagggcgaatttgcgggtagggtgggttttttttcgcgggtttagtatttgtgcgtttttagtttaggtgcgcgggaggaaggtagcggtttgtcgcgtagagttttgcgcgttcgcgaggtggcgttatagtcgtagtagcgttcgtcggttcgggtcgttttagataagagtgtgcggaaagcgcggcggggttgagacgcgattaggacgcggggaggacggattagtaggatagatcgatcgggggttcggcgggcggagggtagcgtagttacgttttttttggattcgtcgttagtcgggttcggggttttcgatatgttttttaggtgggttttcgag

SEQ ID NO: 162 - DNA, 1631 bp, Artificial Sequence
  chemically treated genomic DNA (Homo sapiens)
ttcgaggatttatttggggggtatgtcgaaagtttcgggttcggttgacggcggatttaggggggacgtggttgcgttgtttttcgttcgtcgggttttcggtcggtttgttttgttggttcgtttttttcgcgttttggtcgcgttttagtttcgtcgcgtttttcgtatatttttatttggagcggttcgggtcggcgggcgttgttgcggttatggcgttatttcgcgggcgcgtagggttttgcgcggtaggtcgttgtttttttttcgcgtatttgagttggaggcgtatagatgttgagttcgcggggaggggtttattttattcgtaggttcgtttttttatttgtatttatttgggatttcgatttcggatacgcgagttttagaaattttggggttttgagttgagcgtttttatgtacgtatttttaggtatatagttttagttcggaaaagttttgttcgcgagtacgggattcgggtggtgggggagaggttattttgcgtaggagtagtcgagtttttttggaatttttcgtagatattattgtacggtattgtttatttggacgtattttttaatatatttatttttatttaggcgtatggattcggtgtgcgcggtataaattgatttgtttttagttttatttaggtattgatattaataggcgtttatgtttttagaagtatattcgttttttttcgtagttttagcgttttgggatattttaggggtagttacgtagggtttttcgggaatttgggtagaggtgttatttatatagttcgttttgaattttcgggttttttaaaggaatttacgacgagttattagggcgattggaagtggttggatagcgttttcggggggtttaaagaagtaattatggggttttagaatttttttgtacgtcgttttgaagaatttcgcgtggattttttttttaatttattcgttcgaaggaaataataggggcgtttgcggttgggatttcgtaaggtttcgcgttttacgtgaaggttaggtttgtgtgggtgacgttttttttgggagaaaggggatttcgtattgtcgcgtcgttgttcgtagtattatttcggaagtggtttcgtgtagtttcgtcgcgtattaagttttttgcgaacgtcggattttcgcggtttacgtttcgttttcgtttcgtattttttgattttcgtttatatacggcgtggagcgggggggggggggttttcgagaatttcgtcgttttcgattggttgcgtttttttttatcgcggagcgcgaggggttggggcgttgcgttattatggtaatcggtgaggtgcgtttagattttgttttttcgaggttttggagagtttagtaatcgcgttcgtcgtttttcgcgttgttttttggtttttatggtttcgttagaggtatcggttgagttatcgggcgaggggtagcgggcgcggttattagcggttttcgagcgatattaaggtttcgggcgtttttcggaggttttttttgttgcgtaggcgattttacggtttcggtgtttggcggaggtttcggtttaaacgagttcgtttgattttcgtcgttgtttgagttcgttttatgttttggattt

SEQ ID NO: 163 - DNA, 3523 bp, Artificial Sequence
  chemically treated genomic DNA (Homo sapiens)
ttttgttttcgtttgttttttaattttttttttcgtttgtttttatttgggggttttcgtagttttaggggagttcggagttttgtaagcgtttgtgtatttattttttataaaataaaataaaataaaataaaataaaataaaataaaataaaataaaattttatatatagttaatattagcggtggagcggggcgtattgtatatatttagtttcgttttataaggatgtttaaatcggtttcggagttttggggtgcgttttgaatgcgtttggggtttttgtgttagtgtttttgagtttttcgatttcgggacgcggggttgttggggaggaaagagttttgggtcgagtttcgtttcgtgtttgggcgtttttgtttaagtttttcgttagtaagtttcgaagggtattattaaattatttttggttagtggaaagagggggtttaagagttggagttcggttttgtcgcggttttttaagtcgttttttagaataggaaggaagttcgaggaataaagggggttttaatagagtttagtttttcggtttcgcgtgtgtaatcgttagtggaagagaagtagttttagtcgaggcgagttaatttgggcgcgggtggaatattatagttcggggtaggttttcggtttcggattttcgtttttagttttcgatagcgttcgcgtcgtcgttatagtagcgtttaggatttaacgaggggtttagggttatgggagtcgttagagttttggtttttagacgtgttaggggcgtttgtaacgtcgggtttttagcggggagattttatttgttttttagttatatttgtgatttatttgagtttttcggagtcgtggaaaataattatagagatattaggtattgttaaggaatgtttttattatcgtttttattttatttttggaggtttaagtaagattttagtaattcgttttacggatttttagattttaggtagtttttgtggttgtagggagtttgggtttattcgttgggtttaaggagaatttttcgatttggggttcggttggttcgaggaatcggattttgtgatgaagattttttaggttggatacgtaagtaaattaaatcgtaaattaatgatacgaaaattatatttatacgaaagaaaaatcgattacggttataaaagtgtatggaatttgatttcgttttggagaaatattatataaaagttatttttaatagacgtttgttatttaagagcggtagggatattgttttttatgcgttcgtaaaaatagagtcgtaattgtagttgttgttgttgcgggtaggatttatttttttaattggttaaatggttttttttttttttcgaaggtgatatttgtatttttaaaatttagagttgttggtaggacggttagtatcgattttaatttcgatataaaaataagaggggttgtaaaacgggggaaataaagttgttgtaaataaaatgtaagttattatttttttttaattttttgtattttcgtcgggcgcgcgatcggtagttgacggtttaataattggtatattttaatggaattgcgagggaaatgtaataattttgttataatgggttgtaattttaattcgatttcggtttttgtagttttcggtcggaagttgggcgatgagttttgtttttagcgggtggcgttcgagttcggttgaacggcggtaattggcggcgggtacgcgttcggggcgcgcgcgttatttttttcgtttttatttaatttttttattagtgtacgagtttatttttagaggttattaggtaggatttacgattggataataaaagtacgtgattcgaagtcgtattttatatttgggtgtttacgtaggagggaattaagtatatgttttagttatttttataatttattataaattgtgtaagggtgttatagacgtataaacgatcgcgagttataaattaagtatatatattaaaaaataaatgagtttttattttgtaaatttattttgcggtcgttatttaaatggttcggattattagttgtataattatggagattatagtttcgtgagcgagtaatttagggattcggcgagtatgtatttcggtaggtacggttacggttataatggtatggattttagcgtcggtcgttcgggtttcggttattttggtttcggagagcgcgttcgtagttacgttgttagcgttagcgcggcgttcgtcgagtttaggtatagttagtcggttacgtttacgtattttttttagttcgattcgttgttttgtttcgtcgtggttttttcgttcggtagcgatagttattacggcgggaaaaattttttaagtaattttagcggcgtttcggtcgacgtcggtagtatttatattagtagtagagagggggttggtacggcgttcggagtcgaggaggacgtttttgttagtagcgagtaggcgagtgcgtagagcgagtcgagttcggcgtcgttcgtttaattttagatttatttttggatgcgtaagttgtatataagttatggtaaagttagtttttttttaaatttacgcgatcgcggggacgcggttttcggtttttttttttttttttgtcgtttttttttagttttttttggttttattttttttagttttgcggagttttttttgtcgtttttttttttttgttttttttttttttttttttttttgcgagtattttgcgtttataaatagtgggggaaatgggcgttttttgggatagtttagacgttggaagggggaggaagtaaaaaatttttttggaattttacgttttgggacgcgttttcgggttaggttagtcgagtaaggcgtagagaggtagaggatggttgtagtagtcgtgaatcgggtttgttacggcggataatttatgaggagggttacgttggggaaatagcgttattaattatagttttcgaaaaggggtttgggggaaagaatcgaggcgagagtttgtaggattttgaattttgggggtaggagggagagagaaggaaagggaagaaaaagaaaataggttttttaattttgtaggttggaaacgggaggcggttttcggggttggaattttgagggagggtgattcgaaggttatttgggcgtttaggaaagggttttgttttttgggtttttgtgcggtgggtagtttgggagggttgtgtttttcgatcggggcgttcggggtagggcggagggggtaggagaggggttagggaaagtcggagttcgtcgggatacggttttagttttagatgggtagattgtttttagggtttaaatcgtattgttttttttttagaaaggaagagagaaggaaattcgggaggggtgtgcgggttggtaggtagaatttgttgagtttttcgtttgggttttttgtttatgatttaagtttgtttttttggcggattttggaagataggagttggtggttaaatcgttgatttttttattgtaga

SEQ ID NO: 164 - DNA, 3523 bp, Artificial Sequence
  chemically treated genomic DNA (Homo sapiens)
tttgtaatagaaaagttagcggtttagttattaatttttgttttttaaagttcgttagggggataagtttgggttatgagtagggaatttaggcgaaaagtttaataagttttgtttattagttcgtatatttttttcgaatttttttttttttttttttttagaaagaaaataatacgatttggattttgggaataatttgtttatttgaggttggggtcgtgtttcggcggatttcggttttttttggttttttttttgtttttttcgttttgtttcgggcgtttcgatcgggaggtatagtttttttaggttgtttatcgtatagaaatttaggaagtaaggtttttttttgagcgtttaagtggttttcgggttatttttttttaaagttttagtttcgagagtcgtttttcgtttttagtttgtagggttggggagtttgttttttttttttttttttttttttttttttttttttgtttttaaaatttagaattttgtaggttttcgtttcgatttttttttttaagttttttttcgggggttgtaattagtaacgttgtttttttagcgtagttttttttataaattattcgtcgtgataagttcgatttacggttgttatagttattttttatttttttgcgttttgttcggttggtttgattcgggagcgcgttttaaggcgtggggttttagaggggttttttgtttttttttttttttaacgtttaaattgttttagagaacgtttattttttttattatttgtgagcgtagggtgttcgtaaagaagaggaggaaggaggaaggtaggggagggagaacggtaaggagagtttcgtagggttgggagaaatgagattaagagagattgggagagggcggtagagaagagaggggggatcgagagtcgcgttttcgcggtcgcgtggatttagaaaaaggttggttttattatgatttatgtgtagtttgcgtatttaggggtagatttggggttgggcgggcggcgtcgggttcggttcgttttgcgtattcgtttgttcgttgttggtaggggcgtttttttcggtttcggacgtcgtgttaattttttttttgttgttgatgtgggtgttgtcggcgtcggtcgaggcgtcgttggagttgtttagggagtttttttcgtcgtggtggttgtcgttgtcgggcgagggggttacggcggagtagggtagcggatcgggttgaggagagtgcgtggacgtggtcggttggttgtatttgggttcggcgggcgtcgcgttggcgttggtagcgtagttgcgggcgcgtttttcggagttaaagtggtcggagttcgagcggtcgacgttgagatttatgttattgtagtcgtagtcgtatttgtcggagtgtatgttcgtcgagtttttgaattgttcgtttacggaattatgatttttataattatgtaattggtagttcgggttatttggatagcgatcgtaaaatgagtttataaaataagagtttatttgttttttgatatgtgtgtttgatttgtggttcgcggtcgtttgtgcgtttatagtatttttgtataatttatgatgaattatggaaatgattgggatatgtatttggtttttttttacgtaggtatttaaatatggggtacgatttcgaattacgtgtttttgttgtttagtcgtaaattttgtttgatgatttttagaggtaaattcgtgtattaataggggagttgggtggaggcgaggggggtggcgcgcgcgtttcgggcgcgtgttcgtcgttagttgtcgtcgtttagtcggattcgagcgttattcgttggaggtagggtttatcgtttagttttcgatcgggggttgtaagggtcggggtcgaattgaggttatagtttattatggtaaaattattgtatttttttcgtagttttattaggatgtattaattgttaggtcgttagttgtcgatcgcgcgttcggcgaggatgtagaggattggggggaggtggtgatttgtattttatttataataattttatttttttcgttttgtagttttttttatttttgtgtcgaggttggggtcggtattgatcgttttgttagtagttttgaattttgaaaatatagatattattttcggggaagggggaaagttatttagttaattggagaaataaattttgttcgtagtagtagtagttataattacggttttgtttttgcgagcgtatgagggatagtgtttttgtcgtttttaaatgataggcgtttattaaagatagtttttgtgtagtgtttttttaaggcgaggttaaattttatatatttttataatcgtagtcgatttttttttcgtgtgaatatggttttcgtgttattagtttgcgatttgatttgtttacgtatttagtttggaaaatttttattatagggttcggtttttcgagttagtcgggttttaagtcggagggttttttttgaatttagcgagtgggtttaggttttttgtagttatagaggttgtttggggtttggggattcgtggggcgggttattggggttttgtttagatttttaggagtaaaatgagggcgataatggaagtattttttggtagtgtttagtatttttgtagttattttttacggtttcgaaagatttaagtaaattataaatatagttgagaggtaagtggagttttttcgttggaggttcggcgttgtaggcgtttttggtacgtttggaagttaggattttggcggtttttatggttttgggtttttcgttgggttttgaacgttgttgtggcggcgacgcgggcgttatcggaggttgggagcgggaattcggagtcgggagtttatttcgggttgtaatgttttattcgcgtttaggttaattcgtttcggttgaggttgttttttttttattgacggttgtatacgcgggatcgagagattgggttttgttggggttttttttgtttttcgagttttttttttgttttgggaggcggtttgggaggtcgcgataaggtcgggttttagtttttagattttttttttttattggttagagatgatttgatgatgtttttcgggatttattggcgagggatttaggtagagacgtttagatacgaaacggggttcggtttagggtttttttttttttagtagtttcgcgtttcgaggtcggggagtttagagatattagtataggagttttagacgtatttagggcgtattttagaatttcggagtcggtttgggtatttttgtggagcgggattgggtgtgtgtagtgcgtttcgttttatcgttggtattggttgtgtgtgaggttttgttttgttttgttttgttttgttttgttttgttttgttttgttttgtaagaaataaatgtatagacgtttgtaaagtttcgggtttttttgaagttgcggaagtttttagatgggagtaggcggggagaaaagttggggaataggcgagggtaagg

SEQ ID NO: 165 - DNA, 5244 bp, Artificial Sequence
  chemically treated genomic DNA (Homo sapiens)
tggcgttcgttttcggttgtcgtcggggaggtcggcgtggggcgcgggatacggttgcggatttgcggttggcggttgcgttcgtttttgttgggcgtttcgaaattcgcgttattttcgtttgtttattgtaaagattttattcgtggggaaagcggttggagggttttaaagtggggcgggtagggggttggggcgagggacgcggaggagaggcgttttcgtcgggcggtaaagtgtttttagttcgcgggtttaggatttcgtcgggaggcgcgcgcggagcgcgggcgaagtgattgatggcggagcgaggggggcgaggggggttaggggggcgcgagatttcgtcggcggttttttttttttggttaggtttaggcggcggggggttggcggggtgcgggattttgtgcgtggtttttgatttggtaaaaattatagtgtttttttatatcgtttaaattttttaggagatggtttttttagatttttaaattatcgtggtggttttcgagatcgaattcgcgtttatgtaagtttaacgtattgaggacggggtaattattatttagatattttgggtgggtcgtaaaggcgagttatttagacgtatttcggtgagttcggttatgtaggtaggatttgagttgtgtttttcgttttgatttttttttttttggcggtcggagttttcgtaggttttaagtttggtttagattcggttcggcgtagtcggtttttcgcgcgtttcgtatttggcgggggtttcggggtttcggcgcggtatcggggggcgttcgggatttggttgaggttttaagcgtcgcgtggtcggttttttttgttggggtaggtggcggttgcgcgtttcgttcgagtttaggggtttttttagtcgtaataattagtaaggatttttcgatttagttttaagttatttgtatttgtatttagacggggcgtattcgtagtgtagttttttggtggggcgttgggagttcgtttgtttttgtttgttcggagattttagtttacgagtataggtcgttcgggtattttagaaattcgggatggggtttttgaattttttagaacgggtatttagtatggttttggcgttttgcggttttttgttttttatttagtttcgttttcgcgtattttttagtttttgcgatcgtcgttttttttttcggggttttagggtttttagttcgtatttttcgtttcgtttttggttcgggttgcgggggcgggtcgggggcggggcgagggtttcgcgggcgtttattggcgcgggcgcgaggttagcgaggttcgcgcgggttttgggtcgcgggttggcgcgattataagagtcgggcgtgggcgttcgtagttcgtttgtttttcggcggagttgcgtgaggttcggtcggtttcggtttttttttttcggtcgttttcgttttttggtttacgtttgttcgcgttttgtttattagcgtttttatcgggtaaggcggtttcgcgtcgacgtcgttcgttgtttcgttgttgattttcgtttcgggcgtcgttcgcggggtcgcgtttcgtcgggtttgcggatttttcgtcgttttttttttatttattttaattttttttattttcgtttcgttcgaggaggcggtttttttcgtaggtagttcggttcgtaggtcgtcggcgttgttatttttttcgcgttttttttttagtttttttttcggcgcgtagtttcgggtcgttttttttttcgcgttgcgtttcggagcggtttcggtgtcgttatcgtttgtttttttttcgaggttcgggttcgcgacggtagagggtttcgtcggtttaaatcgagttgggcgttcgcggttcgggtgtagtttttatttcgttttttagttatcgtttttttcggtttttcgacgtggcgttttttttttcgtttttttgtgtttttcgcgttttttttggcgtttggtttcggttttcgttttttttttcgtaatttttttttcgttttttttcgttttttttagtttttagttttcgatttttttttttttttacgttcgttttttcgttttcgtcgaattaaagtggattaattatacgttttttgttttttttcgtgttgttttttttcgttgtgcgtttgttcgtttttcgttgttttttttttttttcgtttttttttcggttttttttttttacgtttattttgttttttttattatttttgtttttttttatttttgatataatagttgattttatttttcgatattttttttttttcgaaaagtataatatttggttcgttttagttcgaagatagttcgttttttttggataattagacgaattttttttttttttttaaaaaaaagttattttttcgttttgtttcgtcgtatattcggttttcgcgattcggttagagcggcgttggtagaggagtgttcggtaggagggttaacgttcgttgttcggtttgcgatacgtagtagggaggtgggcggtagcgtcgtcggtttttaggtaagcggcgtgtgcgggtcgggtcggggtcggggttggggcggcgcgggtttgcgtcggacgttcggtttttttttcgttcgttttcggttcggggtttgcggggttcggcggggcggttgagttcgggggggaggaggaggaggaggaggaggacggacggttgcgggtttcgttttttgcgcggagtttcgcgtttattttggcggcggagttgggggtggggtgggggcgtcgggaagggtcgagggaggtgtgaggtgtttgtaggggcgatttttcggtcggtttgtgggtgtagggggtgtcgttttatatgtgtgattcgtgttttgcgggttttggttttcggggtgttgggtaacgaggaggggcgcggagtcgtagaagtttattttggtatgttgacgcggtgttagcgagatcgcgagaggaagacgggggtgggcggggttaggatggagaggggtcgagttggtaggagttatggtagacgttatattcgcgatattttttttatattttttttggttttgttcgtaatatttttaaataggagtttcgggagagggggagaggggttgttggtttgaggttaagaagggtagagttttcgattcggagagaggtcgcggtttttgtttagtgggtagcgtggaagtttttatataaggaggtgggaaggagattttttttttttttattgttttgtgtagagatgagtcgggggtgtaggatgggagtttatggtatttcgttacgggatggtttagggttttcggttgggggtgtaggagagaagagattggttgggaggagggagagggcgggagtaaaggcgcgggggagtggttagtagggagaggggtggggggtagggtggagttcgggttgggaggagtcggtttatatataaaagttgaggtattgattagtttgtaaattggatattagttttttttgtgaaagagatttttagtttttttttttttttttttttttttttttttttgttttagcgagttttttgttgagttgtaggtaattagggttgtggagtgaggattttcgttgttattttattttagtttgaggtagggtagtagggggtacggtttacgtttgggtttcgggttttgtagtcgttagttcgttgtttttcggatagtattttttttttttttttttttttgtttttgtttttatttggtttttgtttttttatttgttttttttttttttgtttttttttttcggttttttttttgtttagtttagggttttttttgggtttttatttgtttcgtatcgttgtatgttttttgttttgttttttgtcggttttttgattcggatttttaagtttagagtggtggggtttgttgcggaagcgcggcgagggttagagtggttagttggcggagtgtgtttttagaatttggaagggggtggtagagggggcggtgagaggattggttagggtttagttaaggagatgattaaggaggtttttagattttcggcgtagttgtttattagtttttagagagggtatgtaaagttgtgtttttgttttattgtttgtttagtcgtttatataatttattgtattaaaaatttttttgggtttgcggagcgaaggttggggttgttcgtttggagggttttattttttgtaggggtagggttaatttgttgtggtggttttcggttttttattttcgagtgggttaattcggttttgtggttttgtagtttgtggagggggtgtgttttaagattggtttttttttttagattgtagtttggggaatttggtgtcggattttttaggtggtttgagttggtttttttagtttttacggggagagtttggtagcgtaaatagggagatgttttggaggtttttggttttattggttcgatttgaggtttggaaaggaggttttgggcgtgtgtgtgtgtgtttgggggtatttaaggtagattggagttggagaattgggtgattgggaaaataaggtttttagagtatgggtggcgtggttgtgttaattattggagtttttgatttaggtttggtttagttgtagattggaaaggtggaaaagttagggggaggggcggggttggtttagtaggattggtttgttgttttgagggcgatggtttttttggattttttttgtttagttgggggttgtggggaggaagggattggtttttttggatgtatatgttttgtaggggtggggttgtttgttattttggttggcgttggaggtttgagaagtggcgatgtgacgttgggttggttttgtttttatggtgttataggacggaggttaggtcgggtgtttagtttgggtttttgtagttgtggatgtcgttgagtttttgtaataatgatcgtggagatggttatttttcgtgtaaaattattagtgttttttgtaaatggaaggaattgggttttttttgtgtgtttttggacgttttattttgtatatggttttgcgtttttatttcggtattatgatttgtgtgttatttttgtaataaaaataatgtttataggaaagtcgtgtttttaatttttaattgaatttgtaggttggtaaatttggtttgggaggggtatttttggtttggggtttggtttggttgtttcgtttacgttatttttttttcgtttttaga

SEQ ID NO: 166 - DNA, 5244 bp, Artificial Sequence
  chemically treated genomic DNA (Homo sapiens)
tttgggggcgggagagaagtggcgtgagcggggtagttaggttaagttttaggttagaggtgttttttttaaattaaatttgttaatttataaatttagttgaaaattgaaagtacggtttttttataaatattatttttattataaaagtaatatataggttataatgtcgaggtgagggcgtagggttatgtgtagaatgaagcgtttagaagtatatagaaaaggtttagttttttttatttgtaagaagtattagtaattttatacgaggggtgattatttttacggttattattgtaggagtttagcggtatttatagttgtaggggtttaggttggatattcgatttggttttcgttttatgatattatgggggtagggttagtttagcgttatatcgttattttttaggtttttagcgttagttaagatggtagatagttttatttttatagagtatgtgtatttaggaggattagtttttttttttttataatttttagttgagtagggggggtttaggaggattatcgtttttaaagtagtaggttagttttgttgggttagtttcgtttttttttttggtttttttatttttttagtttgtagttgagttaggtttgggttaaggattttaatggttaatataattacgttatttatgttttagaaattttgtttttttagttatttagttttttaattttagtttgttttgggtatttttaaatatatatatatacgtttagagttttttttttaggttttaaatcgaattagtaaggttaggggtttttagaatatttttttatttgcgttattaaatttttttcgtgggagttggagagattagtttaggttatttgggaagttcgatattaggttttttagattataatttggaaggggaggttagttttaggatatattttttttataggttgtagggttatagggtcgggttaatttattcgggggtgggaggtcgggagttattatagtaagttggttttgtttttgtagaaggtggaattttttaggcgggtagttttagttttcgtttcgtagatttaggggagtttttgatgtaataaattatgtgagcgattgagtaggtagtgggatagaagtataattttgtatgttttttttaaagattagtgggtagttgcgtcgaggatttgaaagtttttttggttatttttttgattggattttggttagtttttttatcgttttttttgttatttttttttaaattttaagagtatatttcgttagttggttattttagttttcgtcgcgttttcgtaataagttttattattttgaatttggaggttcgggttaggggatcggtagaaagtaggataggaagtatgtagcggtgcggagtaggtgagggtttaggaaaagttttgagttgggtaaggagggggtcgaagggaaggaatagaaagggaaggagtaggtgagggagtagagattaggtgggggtaggggtagaggaaaagaggggaggggggtgttgttcgagaggtagcgggttggcggttgtagggttcgaggtttaggcgtgggtcgtgttttttgttgttttgttttaggttggagtgggatggtagcgggggtttttattttatagttttggttatttatagtttagtagaaggttcgttggggtaggaggaggaggaggaagaggaggaggaggaagttggaagttttttttataggagaagttaatgtttagtttgtaggttggttagtgttttagtttttatgtgtgagtcgattttttttagttcgggttttattttattttttatttttttttttgttgattattttttcgcgtttttgttttcgttttttttttttttttagttagtttttttttttttgtatttttaatcgggagttttggattatttcgtagcgaagtgttatgggtttttattttgtattttcggtttatttttgtatagggtagtgaagggggggggggttttttttttatttttttgtatggaaatttttacgttgtttattgggtaggggtcgcggttttttttcgggtcgaaggttttgttttttttagttttagattagtagtttttttttttttttttcgggatttttgtttggaaatgttgcggatagagttagagggggtgtgggggagatgtcgcgaatgtggcgtttgttatgatttttgttaattcggtttttttttattttggtttcgtttattttcgtttttttttcgcggtttcgttggtatcgcgttaatatattagggtgggtttttgcggtttcgcgttttttttcgttatttagtatttcggaggttagggttcgtaaggtacgaattatatatgtgaggcggtattttttgtatttatagatcgatcgggaagtcgtttttgtagatattttatatttttttcggtttttttcgacgtttttattttatttttagtttcgtcgttagggtgagcgcggggtttcgcgtagggaacgggattcgtagtcgttcgttttttttttttttttttttttttttttcgggtttagtcgtttcgtcgagtttcgtaggtttcgggtcgggagcgggcggaggaagggtcgggcgttcggcgtaagttcgcgtcgttttagtttcggtttcggttcggttcgtatacgtcgtttatttggaagtcggcgacgttgtcgtttatttttttgttgcgtgtcgtaaatcgaatagcgggcgttggtttttttgtcggatatttttttgttagcgtcgttttggtcgagtcgcgggggtcgaatgtgcgacggggtagagcggggggatggtttttttttggggggggggggagaattcgtttgattgtttagggaggacgggttgttttcgggttggggcgggttagatgttgtatttttcgggggggaaaaggtatcgggaaatgaggttagttgttgtattaaggatagaggggggtagagatagtgggagagatagagtgaacgtgaaaggggggggtcgaagagagggcgagggggagagaggatagcgagaggcgggtaggcgtatagcgggagagaatagtacggagagaaatagaaagcgtgtaattaatttattttggttcggcgaaggcgagagggcgggcgtgagggggggagggagtcggaggttaggagttgggggggacgggagggagcgaagggaaggttgcgggagaaagagcgggggtcggggttagacgttaagaggggcgcggggagtatagagaagcggagggaagggcgttacgtcgaggggtcgggggaggcggtgattggggggcggagtggaggttgtattcggatcgcgggcgtttagttcggtttgggtcgacggagttttttgtcgtcgcgagttcgggtttcgggagggggataggcggtggcggtatcggggtcgtttcgggacgtagcgcggaaaggggagcggttcgaggttgcgcgtcggggggagggttggagggggagcgcggggggggtgataacgtcggcggtttgcgagtcggattgtttgcggggggaatcgttttttcgggcgaagcggggatggggggagttgaggtagatgaagaggaggcggcggggaattcgtaggttcggcggagcgcgatttcgcggacggcgttcgggacgggagttagtagcgaggtagcgggcggcgtcgacgcggggtcgttttgttcgatggaggcgttggtgggtagagcgcgggtaggcgtgggttaggaggcgggggcggtcggaaggggggggtcggggtcggtcgggttttacgtagtttcgtcggagagtaggcgaattgcgggcgtttacgttcggtttttatagtcgcgttagttcgcggtttagggttcgcgcgggtttcgttggtttcgcgttcgcgttaatgggcgttcgcggagttttcgtttcgttttcggttcgttttcgtaattcgagttaagagcggggcggggggtgcgggttgggggttttggggtttcgggggggggggcggcggtcgtaggggttggggggtgcgcgggggcgaggttgggtggggggtagggagtcgtagagcgttaaggttatgttgaatgttcgttttagagaatttaggggttttatttcgggtttttggggtgttcgggcggtttgtgttcgtgagttggggttttcgggtaggtaggggtaggcgggtttttagcgttttattaggaggttgtattgcgggtgcgtttcgtttgagtgtagatgtaggtggtttggggttgagtcggggggtttttgttggttgttgcggttgagggggtttttgggttcgggcggggcgcgtagtcgttatttgttttagtagaaggagtcggttacgcggcgtttggagttttagttagatttcgagcgtttttcggtgtcgcgtcggagtttcggagttttcgttaggtgcgggacgcgcggaaggtcggttgcgtcgggtcgaatttgggttaggtttggagtttacggaggtttcggtcgttagaggagagaggattagggcgggaaatatagtttaaattttatttgtatggtcgagtttatcggggtgcgtttaagtagttcgtttttgcggtttatttaaaatatttggataatggttatttcgtttttagtgcgttggatttgtatagacgcgagttcggtttcgggggttattacgataatttgggggtttggggaaattattttttggagagtttgaacgatgtaagaaagtattgtgatttttattaagttaaaaattacgtataaaatttcgtatttcgttagtttttcgtcgtttaagtttagttaaggggaaggggtcgtcggcggaatttcgcgtttttttggtttttttcgtttttttcgtttcgttattaattatttcgttcgcgtttcgcgcgcgtttttcggcggagttttaggttcgcgggttagaggtattttatcgttcggcgggagcgtttttttttcgcgtttttcgttttagttttttgttcgttttattttgggattttttagtcgttttttttacgaatgagatttttgtaatgagtaaacgaaagtggcgcggatttcggggcgtttagtaggagcgagcgtagtcgttagtcgtaagttcgtagtcgtgtttcgcgttttacgtcggttttttcggcggtagtcggagacgagcgtta

SEQ ID NO: 167 - DNA, 2932 bp, Artificial Sequence
  chemically treated genomic DNA (Homo sapiens)
gttaagaataaaatatattaagataaggaaaatttgtagttaagaatagaaaaaaattatggttttgaagtatgagttatttaaagaaagtggaaatatttttagattatgtagtaaaaaataaagtgattttttttttttaaatttatgtaataaattgataggtaatatgtgaaagttatagaatgtagattagaggatataataaatttattttttttatgtttataagaagtaagaaaagttttgatgtgagttagtattgttttataattttgaattgtgtagattgtacgtatttttttttagtttgaagtaaatagtggataggaaaaaatattaaatgttggtagtaaatatggaaggaaattataattaatgtaatatgttaaaatatgttatgtttattttattaatttgaattaaaatgtaagaatttaaaatgttttggaaaaatacgggtattgatttgacgtttgaagttttaaaatattatatattttgaaatagtatttgtattttgaaatatttgtttttatatattttttaaaatttttttttttttttattttatttattattaaataaaggatgaatagatgtaatttagaaattgttaagtatgttgaagaaagattattgtagaaaaattttttttagtttttttaaaggtgttaggaagtagaaaggtgatatagaattggagaggtcggagtttttgtattaattgtattaaatgcgaatttcgagaaaattttttttaattacgttttgtagttatatggatatgaagatttatgtgaattttgaaagacgtgtttatataagttgaaatgtttttaatgatttagttgatgcgcgtttttttatttgttttttttagagaggtgtaacggaagttagaatattttttttggaaatttaatttgtttcgtagtttttcgaggaattagtatttagttaattcgggtcgggagtagttatttgtggtgaggttgattggttgggtaggaatagcgtcggggcgtgggttgagtatagtcgtttcgttttttttgttataggaagtttgagtttattcgagtagcggtttttttaagtttaaagaagtagaggtcgttgttcgttttttttaggtttttttattaaagtcggagtatttttttttaaaattttacgttttggtggtcgttttaaggagcgcgaggtaggggtacgtaaagttgggagttattatgggatagtttttaagtgttaggtttttagattttttgaatttggtttttacgggagaagggttttttgaggcgtggatagtgtgaagttttttggtaagtttatggggattaagtggggttagatttagatttaggagtttttggagtagcgtttaaatcgtagtggtattggattatgttgttcggagcgcgtatagttcgcgcggtgcggggatttgttttttgagttcgcgggcggtgggtgggaggaagtatcgttcgcggcgattggaatcgggagggagaatcgtattggcggcgggtaaagtttagaacgcgttgttagatttttaattttgttttcgtggagatgttggagatttcgcgtataggaaagtttttgtagtgtttatcgcggttagagtagttggggtattaacggcgggcgtttttttttattgttttttggtttcgacgggggattagaggttagttttatttttagcgcgtttgaggtttatgtatttggttaatgagttgcggtttttttttaggtcgggatggattttgaaggggatcgtaatggaggagtaaagaagaagaatttttttaaattgaataataaaaggtaattagtttgttttatttttatagtttatatagttgcgagatttgagtaatttatttttagtttttagttttgaaataaatgatatgttgttgtttttaattatttttaagaaacgtaagttagtttttggaattaatatttttgtttagagtagaagtttgttggttgagtggagtatagtatatgtattttttttgttttttttgtttttttttttaatgatatataatattttatatatttatgaaatggggtatatggaagcgttttttatatgttcggaatgtgtaatgattaagttcgggtatttgaaggatatattattttaggtatattttatttttatgtgttgataatattttaagttttttagttattttgaaatatataatatattgttaattgtagttattttcgtttgttatcgaatattggaatttatttgttttatttaatcgtttttagttatttattaatttttttttattttatttttttatttttttcggttttttttttttagttttggtgtgttttttttttagtttttttgttttagataggcggatgtttatatgtgtttttgttttatgaatttttgttttttaagtggtgttggtcgtttatacgtgagttatatgttgttggtgatttgttttgtggtttaggtttttgttttcggtaaatggttatgtaaatatcgcgtttgtggtttggttgatgagatagaaggttaaaagtatatttaggttgttaattggtaataaatatttgtatataatattggtaatgtaattatatagggaaaataattatttaaagtaaattttgattatggtgttttgtttttatagaatatttaaaattttattaaatagatttattgttagtagtaaattgtaaaatagattagtaagtttaataatattagaaattgtaatgtaaattataagataaattagttaaatatattaatattataagaaattaagttttttagtgtaagagaaaaaatataaatgtggaaattaaatatatttttaaaaataatgttaagtttgaattagaaattttaatatgaatt

SEQ ID NO: 168 - DNA, 2932 bp, Artificial Sequence
  chemically treated genomic DNA (Homo sapiens)
aatttatattgaaatttttaatttaaatttaatattatttttaaaaatgtatttgatttttatatttgtatttttttttttatattgaaaagtttggttttttataatattaatgtgtttagttaatttattttataatttatattatagtttttaatattattaaatttattagtttattttataatttattattaataatgaatttatttagtgaagttttaaatattttataaaggtagagtattatgattaaaatttattttaaataattattttttttatatgattatattattaatattatatatagatatttattgttagttaataatttaaatgtatttttgattttttgttttattagttaggttataaacgcgatgtttatatagttatttatcggaagtaagagtttggattatagagtagattattagtagtatatggtttacgtgtgggcgattaatattatttgaaaagtagaagtttataagatagaaatatatatgagtattcgtttgtttggggtaggaaagttgagaaagaggtatattaagattaagggaaagaggtcgggaagggtaaaaaggtgaaatgaaaagaggttggtgaatgattaagaacggttggataggataaataagttttaatgttcgatagtagacgagggtgattatagttagtaatatattgtatattttaaagtagttagaagatttaaaatgttattaatatatagaaatgaaatatatttaaggtgatgtattttttaaatattcggatttgattattatatatttcgggtatgtaaaaaacgtttttatgtattttattttataaatatgtaaaatattatgtattattaaaagaaagaataaaaaagatagggaaaatgtatatgttgtgttttatttagttaataaatttttgttttaagtagggatattgattttaaaggttagtttgcgttttttaaaaataattaaaaataataatatgttatttattttagagttggaggttagaaataaattatttaaatttcgtaattatgtaaattatgaaaatgaaataagttagttattttttattgtttagtttaaaaaagttttttttttttgtttttttattgcggttttttttaagatttatttcgatttgaagagaaatcgtagtttattagttaaatgtatgagttttaggcgcgttggaggtgagattaatttttagtttttcgtcgaagttagagagtagtaagagggagcgttcgtcgttgatgttttagttgttttggtcgcgatgggtattgtaggggtttttttgtgcgcggggtttttagtatttttacgaaggtagagttgggggtttggtagcgcgttttggattttgttcgtcgttagtgcgattttttttttcggttttagtcgtcgcggacgatgtttttttttatttatcgttcgcgggtttagagagtaggttttcgtatcgcgcgggttgtgcgcgtttcgggtaatatggtttagtgttattacggtttgggcgttgttttaggagtttttgagtttagatttaattttatttggtttttatggatttgttagaggattttatattatttacgttttaagaagtttttttttcgtgaagattaagtttaggaaatttgaaagtttgatatttgggaattgttttatagtagtttttagttttgcgtgtttttatttcgcgttttttggaacggttattaagacgtgaaattttggaagaagatatttcgattttagtggaaagatttaaaggaaacgaatagcggtttttgtttttttgagtttggaagagtcgttattcgaatgagtttaggttttttgtggtaaagagagcgaagcggttgtgtttagtttacgtttcggcgttgtttttgtttagttaattagttttattatagatgattgttttcggttcggattgattgaatgttgatttttcgagaaattgcgaaataggttgaatttttaggaggaatgttttggttttcgttgtatttttttagaaagggtaagtagagaaacgcgtattagttgaattattggggatattttaatttatgtagatacgttttttaaagtttatataagtttttatatttatataattataggacgtagttaagggaaattttttcgggattcgtatttaatatagttaatataaaaatttcgatttttttaattttgtattatttttttgttttttaatatttttgaaaaggttaggagaaatttttttgtagtggtttttttttagtatgtttgatagtttttgagttatatttgtttattttttatttgatgataaatggaatgaaagaaaaaggaagttttaaaaaatatatagagataggtattttaaggtataaatgttattttaaagtgtgtaatattttaaaattttagacgttagattaatgttcgtgtttttttagggtattttaaatttttatattttaatttaaattagtaaaataaatatagtatgttttagtatattatattagttgtaatttttttttatatttattgttaatatttaatatttttttttgtttattatttattttaaattgaggaaaagtacgtgtaatttgtataatttaaaattgtaaagtaatgttaatttatattagagttttttttattttttatgaatatagaggaaataggtttgttgtattttttagtttatattttatgatttttatatattatttattagtttattgtataagtttagaagaagaaaattattttgttttttattgtatagtttgaggatgtttttattttttttaaataatttatattttaaagttataatttttttttatttttgattataaattttttttattttgatatattttgtttttggt

SEQ ID NO: 169 - DNA, 1157 bp, Artificial Sequence
  chemically treated genomic DNA (Homo sapiens)
ggattttgttttttttgaaggttttagggaagagtgttttttgtttttttcgaaggttttagggaagggtttgtttttttaggtttttggtggtttgtaggtgtagttttttaatttttttttttaagcggtttgttgtttataaggatacgagttatattggatgaggggtttattaattgatggtttttgtaaagtttttatttttaaataaggttatattgtgaggtattgggagttaggattttaatatagtttttttggtggatataatttaatttttaataacgtttatataattttaagtagggtttggtattttgtgtgttttttggagagcggttgagttaggttttggtagtgtttaggttatcggtgattgtagtttttggacggtatcgtttattataggttttggaggttgtttttacggttttttgatagggtttttgttggtttgggggtttttgattaggggagcggttttaggaggggagagattcgcgtttcgggtttagcgtagtcgtttcgagtaggatcgggatttttattaagcgggcgtcgttttacgattttcgcgcgtttttaggattattcgggtacgtggtaggtcgtttgtacgttcgcggattatttttgtgataggaaaaggtacgggttatttggtaaattaaggtatagagttttaggcggaagttgggaaggcgtcgttcggtttgtatcggtcgaagggttattcgggttaggcgtatagggtagcggcgttgtcggaggattagggtcggcgtgtcggcgtttagcgaggatgcgtagattgttttaggttcggcgtcgtcgtattgggtatgcgtcgattcggtcgggcgggaatatttcgtttcgttcgggtttcgttttagtttcgttttcgcgcgtttcggtttcgttttcgcgcgtttttttgttttttttaggttttcggtttcgtttcgttttagatttcgttttacgtcgttattttcgtgtttttcggtttcgttttcgcgtttcggatatgttgggatagttcgcgtttttagaacgttttgcgtttcgacgttcgtaggttttcgcggtgcgtatcgtttgcgatttggtgagtgtttgggtcgtttcgttttcggaagagtgcggagttt

SEQ ID NO: 170 - DNA, 1157 bp, Artificial Sequence
  chemically treated genomic DNA (Homo sapiens)
gagtttcgtattttttcgggagcgaggcgatttagatatttattaagtcgtaaacggtgcgtatcgcgaggatttgcgggcgtcgggacgtaaagcgttttaggggcgcgggttgttttagtatattcggggcgcgggggcggggtcgaggggtacggggatggcggcgtggggcggggtttagagcggggcggagtcgaggatttgagaaaagtaagagagcgcgcgggggcggggtcggggcgcgcgggggcggagttggggcggagttcgggcggggcggggtgttttcgttcgatcgggtcggcgtatgtttagtgcggcggcgtcgggtttgaggtagtttgcgtattttcgttggacgtcggtacgtcggttttggtttttcggtagcgtcgttgttttgtgcgtttgattcggatggtttttcggtcggtataagtcgggcggcgtttttttagttttcgtttgaggttttgtgttttagtttgttaaatggttcgtatttttttttgttatagggatagttcgcgggcgtgtaagcgatttgttacgtgttcgagtggttttgaaagcgcgcgggggtcgtaggacggcgttcgtttagtgagaatttcggttttgttcggggcggttacgttgagttcggagcgcgagtttttttttttttggggtcgtttttttagttagggatttttagattagtagagattttgttagggggtcgtgggggtagtttttagggtttgtggtgggcgatgtcgtttaggggttgtagttatcgatggtttagatattgttagagtttgatttagtcgttttttagagagtatatagggtgttaggttttgtttggggttgtgtggacgttattaggagttgaattgtgtttattagagaagttatgttggagttttaatttttagtattttataatgtgattttatttggagatggggattttatagaagttattaattagtgggttttttatttagtatgattcgtgtttttataggtagtaggtcgtttggggaggaggattggagggttgtatttgtaagttattagaagtttaagaggatagatttttttttggagttttcggagggagtagaggatatttttttttggagtttttagagggagtaggattt

SEQ ID NO: 171 - DNA, 8093 bp, Artificial Sequence
  chemically treated genomic DNA (Homo sapiens)
ttatggaaggaaatgagattagttagcgagttgatatagaataaggtagtttaaaataaatttttttaaaaatacgaagaatagatattgaagggaagaggtgtttgtaaagattaagaaagtatatttggagatggtatttttttaaagttaaagttattaagtgtttaagtgttttaaggagggtaagattattaataaggatttagtatagtagagtaatttgagtggtaatacgggatattgggaatataaatttgttaagaaaattagtaggaatgagttataggatagtaattggtaaggatttaataattttttttttaatgtacgtattttaattatatttattgttataataggattagtaataattatatttatttaaaaaaaaaaagattgttatgtagttatagaattatttaatatagaaaatagtaaaatatatttttttttttttttttttttttttttttttttataaataagattagtttatagtaaattttttatagttaagggttaatttaaaatttttggtttatattttttttttatttaatgattatatgatgtaaattaattttattaatattttaagtaaaatatattggaattttataaaatgtataagattttaatatttaaggaattggggttagaaagtagaagtggtttttaggttttttagttttttttttaagtaataaagttttgttgtgaatatttaaagttattgggaaattatcggtagatttttttgtttttttttttcggttttttattatgttgtttttttagatatgtaagtttattttattaattaaaattttagtttgattatttttgataagtatttaatcgatatgtaattttttttttgttttaaatatgtataataggatagagtttttaaatttgatttaattattaatttttgatttataagtgttatggtgagttaatagaatttattaatgtttttattgtattttattagttaaatttagaaggttggaattagttttttttatttagtattttgttagtttgtttagtttgtatttttaattttgtttttaatggtaatttgttttattttttgaaataaaataatttatattttgggagggttaattttttattgtgttaggttgttttatgtattgtaggggtgagtgtttttaggtttaaatgttaatagaagtttttagtaaatatgataattaaaaaagtgtttttatatattttttagtattttttggaatgataggttattgtttttagttgaaagttattggtataattttggtttttaagtttttatgttatttattttaattgtttagatattaattttatttaaatttttagttatagtttggttttttgaatttgttggattagtaattatagattaaggtgttttaatagttaagataggattttggaataagagtttttaaattgtataatatttgagaggatttatgaatataaattgggttttgtttataattagttttatataatgaattttaagattgtttttttatggtgaatagaagtttggaaattattgttttggtataaagtagattattttagtagaaatatagaattattgtaatttgtgaataagattgtttttaaatatttttatttgtgtgttattttatatatagaatgtgtacgatagttttaaattttagaataaatttatttttagtatttaataaaatttgatattgtattattttaaaataaagtgtttattttaggtaggattttttaaaataaagtagtaatatttacgtagataagataaaaaagttaaaatattttatattttttaattttggagtgtaattttttttttttatcgtttttgatagggttaaatttgtgtttatagtaaaaaaaaaaaaaaaaagaattattaattggtaattattaagattttatatttattatagttttttaataggtaagttgataaaatagtttttagttattaaaaaaaaaatttaaggaaaatttttaataattagttttatttttaaattgtatgaagttttttatatttgaaatttaaaaatgattttaatgattttttttattagtaatgtgttattattgaggtgggtgatggggagggaagagggaagaaatttgttagtattattttcgaatttagaaatgtttaaaaaaaagttttaaatattttgatggttagataaaatatttttattgttatgtatgggttttttttttggaaatttatgaatttgttatgtgagtttttgtaaattggtttaaaagtatatttaaggagttgataatttaagattatatgaattagaattttaatattttattaaaataagagttgaaatttttggtatttatttttagaatatttaaaaaatagattgtaaatttaatttatattaatattaaatttttttaaaattaattatattataaaagataatgattttgttattaaattaagttttaaaaaaggtggtatttttatgttttagttttatgttgttatttgagatgaaaaaaaaggtaattgttagaattttaattgtgattagtttggacggttggtatttggtatttttttataatttaaattagtaaatttgaaaatttaaattaatttttgtttttagaattaaatttttgttgagttttttaattttgtattataaagttttatggattagatttattttttttttttataaggttattttaatcgggttttattttagttgtggtaattcgaaatagggtttggagatgtttatttgttaatggttgatttaaagtgtgttggtttcgagttaaatatgaaaaagtttttttatagatttggttattattaaataaggatgttattttataggtaatttttttgataattgggtaggatttagtagataatttagtataaaattgttttaagtttttgattttgtatttattttaaagattagtgtttgtttgaagttttgttagttttatttttattgaaataggtgtatatttaggtttaaagttaaatggatttgaaaaaagttttaagttttttttaatgaatttgaggtttttaaaatgttttttaaattttttttggagacgatagattattatttgatatttattaggattaaatatttttttattttttttattttgttgttttagtttattaataatttttttgagggtaggaaagtttgttagatttttttttttaatatgtttttgaaataaatttagtttaatttcgaaagtataaatatggttaaaggtagtagtagtaaagattttattaattcgtaattttttattgagttttcgaaggtgttttataatgtttattaagaagttaaagttataaagttattgtttgtttgagaagtggattgttgttgtttttattgaaattaagaacgtttttatttttttttttagagagaatattagttttaaagtttttttttttttaagttaattgtttagatatcgtttattaatttttttattatgttttgatttagatttcgttagtaaagtttgaaatttaggtcgtttaacgtttttggttttaattaaaattatttattcggatatggtatttatgatttgattaatatttatattataggagtttaatagttttaagtgaagaaattttgaataatgaatgatattttaatagttggggtttacggtttttttttttatgtatgagacgagttttgagtttttattaattatttttaaagtatgggtcgtggttagtttaattattttttgtaagttaagttttgttgtttgtagggattttaggattgtcgatatgagcgtattaatattgaaatgatgagttaggttgattatggttagaagatttttttgtatttttaatttagggtttatatcgcggataaagattaggaggtagtttttataggttataaaagtttggtcgtttaaggtaagagaataggttttaaagtttttggttcggttaaaaagttggttgcgtagatttttgttaatgtttaggattttttgttttgtgatatttggagataagttaacgttttgtaggacgtttatatgttcgggtagtattttttttagtaatatttttatgtattggtatataaagttttttttattttagtcgcgattttttaaggttaagaggcggtagagttcgaggtttgtacgagtagttttttttttaggagtgaaggaggttacgggtaagtcgttttgacgtagacgttttattagggtcgcgcgttcgtcgttcgttatatatcgttcgtagtattcgtgtttagtttcgtagtggcgtttgacgtcgcgttcgcgggtagttacgatgaggcggcgatagattaggtatagggttttatcgtttttcggaggttttattattaaataacgttgggtttattcgggtcggaaaattagagtttcgtcgatttttattttgttttttttgggcgttatttatattttgcgggaggttataagagtagggttaacgttagaaaggtcgtaaggggagaggaggagtttgagaagcgttaagtatttttttcgttttgcgttagattattttagtagaggtatataagttcggtttcggtatttttgtttttattggttggatatttcgtatttttcgagtttttaaaaacgaattaataggaagagcggatagcgatttttaacgcgtaagcgtatatttttttaggtagcgggtagtagtcgttttagggagggacgaagagatttagtaatttatagagttgagaaatttgattggtatttaagttgtttaattaatagttgtcgttgaagggtggggttggatggcgtaagttatagttgaaggaagaacgtgagtacgaggtattgaggtgattggttgaaggtattttcgttgagtatttagacgtttttttggtttttttggcgttaaaatgtcgttcgtggtaggggttattcggcggttggacgagatagtggtgaatcgtatcgcggcgggggaagttatttagcggttagttaatgttattaaagagatgattgagaattggtacggagggagtcgagtcgggtttatttaagggttacgatttaacgggtcgcgttatttaatggcgcggatacgtttttttgttcgggtagaggtatgtatagcgtatgtttataacggcggaggtcgtcgggttttttgacgtgttagttaggtttttttttttttcgtagatcgtgtgtttttttatcgttttttttcgagattttttaagggttgtttggagtgtaagtggaggaatatacgtagtgttgttttaatggtatcgttaattaagtaaggaagttatttaatttaaaattatgtatgtagaatatgcgaagttaaaagatgtataaaagtttaagatggggagaaaaatttttttttagagggtattgtgttattgtttttttgttttttatttattttagaaattatttgtttatatttaaaggtataatttattttgagttttttttaaaataaatcgtttgtagttttaggataggttgatgtattttgggtttgatttttgattattttattgttaaattagtgattttttttagtgtttttttgttttttatttcggaggacgtatttcgaagatattagattttatgggttatttttggattttgaagtttataattgtgataaaaaatgtgaagggaagagatttgaaatatgtggaaggaaaagtgagtgtagattataaatttttaaaaagataagtttaaaatatatttaaacgttatgttagattattttgttaaaattagttgttagtgacgttcgtacgttaatagaaaaaagaatgttttagtttggagtggtaggtttttagagggatttattgtgaaagtataaattatttagggtaatgggattgagagaatagtgggtagaaaggattattgaaggaaaggaagagaattggaaggtagatgaaagaaggagtaagaatttggggatgtttttttttttttatttgtaatagtagtaatagaagtaatggtagattggtttttgtttttattgtgttagaatgaattgataggataattgggtttattattgtattgtgttagaatattgtaaaataaaattaaatatattagtttggtggtttgtaattaattatttaagtggagatttttattttttttttattttttttttagacggagttttattttgttatttaggttggagtgtagtggcgcgattttagttgattgtaattttttttttataggtttaagggagatttttttgttttagtttttcgagtagttaggattataggtatgtgttattatatttggttaattttgtatttttagtagagatgggatttttttatgttggttaggttggtgttaaaattttcgattttaggtgaatcgtttgttttagttttttaaagtgttgggattataggcgtgagttatcgcgttttgtagttttttgtatttttaatagagatagggttttattatgttagttaggatggtttcgattttttgattttaggtgatttgttcgttttggttttttaaagtgttgggattataagtatgagttatcgcgttcggtttaagtggagatttttatatggagtttagttatattttttttaatatataagttgagatgattaatataattttaatataggggtttatgagaaatgtttgtaatatttaagtaatttattgtttttttttttttttttttaagatgaagttttattttgttgtttaggcggaagtgtagtggcgtgattttggtttagggtaatttttgttttttggttttaagcgatttttttgttttagtttttcgagtagttgggagtataggcgtgtatgattatattcggttaatttttttatttttagtagagacggggtttttttatgttggtcgggttggttttgaatttttgattttaggtgattcgtttattttagtttttttaagtgttgggattataggtgtgagttttcgtgtttagtttattattttatttttgaataaagaattgtttgtgtggggaatagataatttttttttatgtagtttttgttagaaaatttgttttttttagtagttggtttgtgtttataggttattttttgaaagtataaaaaatttattgattttttttttttgggtttttttttttttttgagatagagttttgtttttgttgtttaggttggagtgtaatggcgcgattttagtttatcgtaatttttattttttgggtttaagtgatttttttgttttagttttttgagtagttgggattataggtatgcgttattatgtttggttaattttgtatttttagtataaatggggtttttttatgttggttaggttggttttaaatttttgattttaggtgatttattcgttttggttttttaaagtgttgggattatgggtgtgagttattgcgtttggttagaaaatttattgattttttaaagatttattaattttttgtattattttttttttttttttttatcgtaaatataaaagggaatagtagagaaaattatttagaattttattttttagtgatattatttagtgatattttattagagttatttaggaatttgaggttgaataaagtttaggtaaaagtaaaattagttgagaagagatatttgttaaaagaaatttatttttaattttatttgttgttttttttagaggaatagaaatagtgttgaatgttttattagaaatgatggttgttttgttcgtttttttttttttttttatataatatgtaaatttatatagtgtatgagtttgtaagataaaggaaaaatacgttaatgaggtattattgtttgtatttggagtttgttattattgtttggtttatattaaaatatgtatattagagtagttgtagattgataaattattttttgtttgatttgttagt

SEQ ID NO: 172 - DNA, 8093 bp, Artificial Sequence
  chemically treated genomic DNA (Homo sapiens)
attggtaaattaaatagaaaataatttattagtttgtaattattttaatgtatatattttaatatgagttaagtaatgataataaattttaaatataaataatagtgttttattaacgtgttttttttttgttttataggtttatatattgtatgagtttatatattgtgtgagagagagggaagagacgggtagagtaattattatttttaataggatatttagtattatttttgtttttttaggaaagatagtaagtgaagttaaaaatagattttttttggtagatgtttttttttaattaattttatttttatttgaattttatttagttttaggtttttaagtgattttaataaaatgttattaaataatgttattaaaaaataaaattttgaatgattttttttattatttttttttatatttacgatggaggggaaaaaaaaaagtaatgtagaaagttaataaatttttaggaagttaatgaattttttggttaggcgtaatggtttatatttataattttagtattttgggaggttaaggcgggtggattatttgaggttaggagtttgagattagtttgattaatatggagaaattttatttgtattaaaaatataaaattagttaggtatggtgacgtatgtttgtaattttagttatttaggaggttaaggtaggagaattatttgaatttaggaggtggaggttgcggtgagttgagatcgcgttattgtattttaatttgggtaataagggtaaaattttgttttaaaaaaaaaaaaaaatttaaaaaaaagaagttaataaattttttgtgtttttaaagagtagtttataagtatagattaattgttagagaaaataaattttttagtaggggttgtatgagaaagagttatttattttttatatagataattttttatttagaaataagataataggttgggtacgggggtttatatttgtaattttaatatttggggaggttgaggtgggcggattatttgaggttaggagtttaagattagttcggttaatatggagaaatttcgtttttattaaaaataaaaaaattagtcgggtgtggttatgtacgtttgtatttttagttattcgggaggttgaggtaggaagatcgtttgaaattaggaggtagaggttgttttgagttaagattacgttattgtattttcgtttgggtaatagagtaagattttattttaaaaaaaaaagaaagaagataataagttatttaaatattatagatattttttatgagtttttgtattgaagttgtattagttattttaatttatatattaaaaagagtataattggattttatataaaaatttttatttgagtcgggcgcggtggtttatgtttgtaattttagtattttgggaggttaaagcgggtagattatttgaggttaggaaatcgagattattttggttaatatggtgaaattttgtttttattaaaaatataaaaaattgtagggcgcggtggtttacgtttgtaattttagtattttggaaggttgaggtaggcggtttatttgagatcgagagttttgatattagtttgattaatatggagaaattttatttttattaaaaatataaaattagttaggtgtggtggtatatgtttatagttttagttattcgggaggttgaggtaggagaattttttttgaatttgtgaggaggaggttgtagttagttgagatcgcgttattgtattttagtttgggtgataaagtgagatttcgtttaaaaaaaaaataaaaaaaaaataaaaatttttatttaagtaattaattataagttattaagttagtatgtttagttttgttttatagtattttggtatagtataataataggtttagttgttttgttaatttattttaatatagtagaaataaaagttagtttgttattgtttttgttattattattataagtgaaaaggaaaaaatatttttaggtttttgtttttttttttatttattttttaatttttttttttttttttagtggttttttttatttattgtttttttagttttattgttttgaatagtttatatttttataataaatttttttagaaatttattattttaaattgaagtatttttttttttattaacgtacggacgttattaataattgattttaataaaataatttgatataacgtttaggtgtattttgggtttgtttttttggaagtttatagtttgtatttatttttttttttatatgttttaaattttttttttttatattttttgttatagttataagttttaaaatttaaggatgatttataaaatttggtattttcgaagtgcgtttttcgaaataaaggataggaaaatattaagaggggttattaatttaataatagggtaattagaagttaagtttaaagtgtattagtttgttttaaaattataaacgatttgttttgaaagaaatttaaaatgaattgtgtttttggatgtgaatagatgatttttggaatgaatgaaaagtaagaaaatagtaatatagtattttttgaaaaaaggtttttttttttattttaagtttttatatattttttaatttcgtatgttttgtatatataattttaaattaagtggtttttttatttagttaacggtattattaagataatattacgtatatttttttatttatattttaaataatttttaaaaggtttcgggggagagcggtaaagaaatatacggtttgcggaaaaggagaaggtttgattggtacgttagggaattcggcggttttcgtcgttgtgggtatgcgttgtatatgtttttgttcgggtaaagaggcgtgttcgcgttattgagtgacgcggttcgttaagtcgtagtttttaagtgagttcggttcgatttttttcgtattagtttttaattatttttttgatagtattagttggtcgttggataatttttttcgtcgcgatgcggtttattattgtttcgtttagtcgtcgaataatttttgttacgaacgatattttggcgttagaagagttaaggaaacgtttagatgtttaacggaagtgtttttagttaattattttagtgtttcgtgtttacgttttttttttagttgtagtttacgttatttagttttattttttagcggtagttattgattggatagtttgaatgttagttaaattttttaattttgtgggttgttgggttttttcgtttttttttgaagcggttattgttcgttatttagaaggatatgcgtttgcgcgttagagatcgttgttcgttttttttattggttcgtttttaggagttcggggaatacgaaatatttagttaataggagtagagatgtcggaatcgggtttgtgtgtttttgttgaggtgatttggcgtagagcggaggaggtgtttggcgttttttaggttttttttttttttttgcggtttttttaacgttggttttgtttttgtggtttttcgtagaatgtggatgacgtttaaaagaagtaagatggaagtcgacgaggttttagtttttcggttcgagtggatttagcgttatttggtggtggagttttcggagggcgatggggttttgtgtttggtttgtcgtcgttttatcgtagttattcgcgaacgcgacgttaggcgttattacgaggttgagtacgaatattacgagcggtatgtggcggacggcgagcgcgcggttttggtggagcgtttgcgttagggcgatttgttcgtggttttttttatttttgaagagagagttgttcgtgtaggtttcgggttttgtcgttttttggttttgaagggtcgcggttggggtgagggggattttgtatattagtgtatggaggtgttgttgagagaggtattgttcgagtatgtaagcgttttgtaaggcgttgatttatttttagatattataaggtagaggattttgagtattgataggaatttacgtaattagttttttaatcgagttagggattttaaagtttatttttttgttttggacgattaggtttttgtggtttatgagaattattttttggtttttattcgcggtgtaggttttgagttggaggtgtaagaagattttttgattataattaatttgatttattattttagtgttggtgcgtttatgtcggtaattttagagtttttgtagatagtagggtttagtttgtagagaatggttggattgattacgatttatattttgaggatgattggtgagaatttaggattcgttttatatatgagagaaaaggtcgtaagttttaattgttggaatgttatttattatttaggatttttttatttggaattgttgagtttttatgatgtagatgttaattagattataaatattatattcgaatggatagttttgattaagattagaggcgttaggcgatttgaattttagattttattaacggaatttgaattagagtatggtgaaagggttaatggacgatgtttgaataattggtttaggagagggaaaattttaaaattaatattttttttaagaaaagaaatggaagcgtttttggttttagtaggggtaataatagtttattttttagataaataatggttttgtgattttggttttttggtggatattatggaatattttcgagaatttagtgaagaattacgagttagtaaagtttttgttgttgttgtttttgattatatttgtattttcgaagttaagttgaatttattttaaagatatattgaggaaaaaaatttaatagatttttttgtttttagagaagttgttgatgagttaaaatagtaaaataaggaagatgaaaaaatatttgattttgataggtattaaatggtgatttgtcgtttttaaaaagaatttgagagatattttaaggattttaggtttattaaaaaggatttagaattttttttaaatttatttaattttaaatttgaatatgtatttattttagtgagggtggagttaataaaattttaggtaaatattaatttttggaatgaatatagaattaaagatttggggtagttttatgttggattgtttgttgaattttatttaattattaaaggggttgtttgtaaggtggtatttttgtttgatagtaattaaatttgtgaaaaggtttttttatatttgattcgaaattaatatattttgagttagttattaatagatgagtatttttaagttttgtttcgggttgttataattgaaatggagttcggttgggatgattttgtgagagaaagaaatgaatttaatttataaggttttgtagtataagattgaaaaatttaataagaatttaattttaaaagtaaaaattggtttgagtttttaagtttattaatttggattgtgagaaagtattaagtattagtcgtttaaattgattataattaaaattttgatagttgtttttttttttattttaaatggtagtatgggattgaaatatgagaatgttattttttttaaaatttagtttagtgataaagttattgttttttatgatatagttaattttaaagagatttagtattaatgtgagttgaatttgtagtttgttttttaggtgttttgaagataaatgttaaaaattttagtttttattttaatggagtgttaaaattttgatttatatagttttaaattattaattttttaaatgtgtttttgaattaatttgtagaagtttatatagtaagtttataagtttttaaaaaggaagtttatatataatagtggaggtgttttgtttaattattaaaatgtttgagatttttttttaaatatttttgagttcgaaggtaatattgatagatttttttttttttttttttttattatttattttagtgataatatattattgatagaggaagttattagaattatttttaagttttagatataggagattttatgtaatttggagataagattaattattgggggttttttttggattttttttttaataattgggggttattttattagtttgtttattaaaggattatggtaagtatagaattttaatggttgttagttagtaattttttttttttttttttttattgtagatataagtttggttttattaaaaacgatgaggaaaaaagattgtattttaggattaggaggtgtgagatattttagtttttttgttttatttgcgtgggtattgttgttttattttaaaaaattttgtttaaagtaaatattttgttttaaaatgatatagtattagattttgttagatgttagaaatggatttattttaaaatttggaattgtcgtatatattttatatgtaagatagtatataagtagaaatatttaaaagtagttttatttatagattgtagtaattttgtatttttattaagataatttgttttgtgttaaaatagtaatttttaaatttttgtttattatgaaaaggtaattttaaagtttattatgtaaaattaattataaataggatttaatttatatttatagatttttttaagtattatataatttaaaaatttttgttttaaagttttgttttaattattgaaatattttaatttgtggttattaatttagtaaatttaaggaattaggttatgattaagaatttaggtggaattgatgtttgggtaattaaaataaatggtataagagtttaaaaattaaagttgtgttagtggtttttaattagaggtagtaatttgttattttagaggatgttgagaaatgtgtaggggtatttttttggttgttatatttattaggggtttttgttggtatttaagtttaaagatatttatttttgtagtgtatgggatagtttggtataatgaagaattagtttttttaaaatgtagattattttattttaagggatagggtagattattattagaagtaaaattaaaagtataagttgggtaaattgatagaatattagataggagagattaattttaattttttaaatttggttagtaaagtgtaataaaggtattgataagttttgttagtttattatagtatttgtaaattaggaattaataattgaattagatttaagggttttgttttgttatatatatttaaggtagaaaaaaagttatatgtcgattaggtatttattaagaatggttaagttgagattttggttaatagagtaagtttatatatttagagaaataatatagtggaaaatcgaaaaaaaaaaatagaaaaatttatcggtaattttttaatagttttgaatatttatagtagagttttattatttgagagaaagattggaagatttgaaagttatttttgttttttaattttagttttttaaatattgaaattttgtatattttgtgaaattttagtatgttttgtttaaggtgttaataaaattagtttgtattatgtagttattgagtgagggggagatataagttaaggattttaaattgatttttagttatagagaatttgttataagttagttttgtttgtaaaaaaaaaaaaaaaaaaagaaaaagaaaaaagtgtattttattgttttttgtattaagtaattttgtaattgtatggtagtttttttttttttaaataaatatagttgttattggttttgttgtagtagtgaatatagttaaaatacgtatattaaaaaaaaaattattaggtttttattagttattgttttatagtttatttttattagtttttttgatagatttgtatttttagtgtttcgtattgttatttaaattgttttattatgttaagtttttgttaatagttttattttttttgaaatatttgaatatttgatgattttagttttgaggagatattatttttaggtgtgtttttttagtttttgtaggtattttttttttttaatatttgtttttcgtatttttaaaaaaatttgttttagattgttttgttttgtgttagttcgttagttgattttatttttttttatgg

SEQ ID NO: 173 - DNA, 7040 bp, Artificial Sequence
  chemically treated genomic DNA (Homo sapiens)
atatagtttggtttgagggaagatgttagtatgtgattataaattggataaaattatttaagatagtcgtattttaattagattaaattttaaaattttaaatatttataagtattttatgtttttaaaaatatgagaaatttgtaagatattattaaatttaaaggtttttaaaattagtttgaaatatatttgtatgttttaaaattttttgtgaagtttagttgtatttagataagtaaaattttatttacgtatttttagagttaaaatataaaatttaagcgattagggtaaagtggaagtaattaattttaattttttcgtatggaaatagatagtgtgcgttggttatatttagggacgtgttttatgtaatttataaattaagatttgtttcgattatattatatggattatataaaaattaaagtagttgtatatgtattttattgatatagaaataagtttatgttatattgttaagtataaaatttaaattttagaatgttaatagtataattttattgaagtaaaaaaaaattgatatgttttttaagtttgagtttataatttttgtatgggaatttttagtaaagcgtatatatttatttatagtttaattttttagttttaaaaaaggtaaaagtgaaatttcgataatgaaatttacggttgtaattagtaatattatatttgtacggttgtaatattcgcgtttttcgtattgtaatttttggaatttattgtaatttttcgaattcgttgttattcgagattttttaatttggcggttttttgttaggattcgggcggtcgttaagagtgcgtaggcgtaagcgcggtcgtcgtcggtggggttttatgtgttgttgagattgttgttgagtttttgggtttttttaagattgttttttaaaagacgacgtgatgattttaaagagaaaggaaaatttgttgcgtacgtagaagggtaggttgggcgtattttgagcgtttttcggggatcgacggtttcgtttacgtgttttcgggtattagcgcgtttaaagttcgtgtattaggaaacgtataaaagtattagcgggcgagttcgagggcgagtttacgggtagttaggaggcggcgagggcggtttgttttttagagattggggaattaagaaaggtagagttattttttcggttttagcgtagtaagtgtaggaggtagggagggcgtagcgtttcgtcgtttacggtattcgtggaattcggtgcgcgtttcgggagttggggcggtttaggtttagcgtgtttagaaagttaattacgttggttaggaggacgtttttttattattcgcgatttttaggttttgattaaagttaaattaaaaggagttattcgtttcggtatttgttgttatttttgtgataaatatggtgtttgatacgaaagtattttaatagttatgttgttaattaaagaataaaatacgtaaagtttgtgcgttaagaatacgagagtatttcgttttttaggaggtgtagtttattttgttttttttgttttatatataattttaaggagaattttttgttattaatatattttgttttttgtttttgggggatgatataggtatattgtatttgattagattagtgttaattttttatttacgtttttattatatgttgtattattaatatagtaggattttatatttttaatcgtaaaatttaagagtagaaaaatatttaaattgtatgttagtttaatatgaaaacgagttattttagttttgataggatatttttaaattaatattatttaataaatatgttttttattcgtataagtttatatatatggttttttaaatgagttttataaataataattagtattgaggttttgatttaagtatttgaaattttgttattttttataataattttgagatgggtatattttttttattttgtagataaggaaataggtattgggatggtaagaaatttaggttatttggtttttaatagttttttattattatgttaaagttttatttatttttgagatttaaaatattatatagtgtatatatatttggtaattaaattaggattaaatattaaagttaagggttaagtatagtgttttgtaattttagtattttgggaagttgaggcgggtagatcgtttgattttaggagtttaagattagtttggaaaatatggtgaaattttattttaataaaaaaatataaaaatagttgggtgtggtggtgtgtgtttgtggttttagttatttgggaggttgaggtgggaggatcgtttgagttaaggaggtagaggttgtagtgaattaagattatattattgtattttagtttgggtgatatagtgagacgttgttttaaaaagaaaaaagtaaaattaaagtaagaatataataagaaatatgtttggtattgtgttacggggagaaaaaattaatagggagataaattttgtttttagggtaagtgtaatttgttgagtaaaagaaatattttaagatattttaaaaaagaaaataaaggttgttgtaaattggatatttaattaaatatttttgggtagattggtagatgatagatttaatgaatttggggtttataaatatatagaatgttatatttttattaatattttatgttttgggtaaagagtaaaattaattttgaaaatgaattgtgtatgtaattattttaaaaataaagattatataataagttatattattttgtattatgtgtaatatttagggggttaaggtatttttattttgttaatatttatagtatttttattatataattattttagagttttgaattataattttaattaggtgatagttattgagtaaattttgtaatgtaaatttattatagaatataattgtattattttttttttatttattggtatttttttatatttggggtttgatataattgtatataataatttttttattaaaatattttatagagttggttaggtatggtggtttacgtttgtaattttagtattttgggaggttgaggtaggtggattatttggggttaggagtttgagattagtttggttaatatggtgaaattttatttttattaaaaatataaaagttagttgggtatggtggtatgcgtttgtaattttagttattcgggaggttgaggcgggagaatcgtttgaatttaggtggcggaggttgtagtgagcggagatcgtgttattgtattttagtttgggtaataagagcgaaattttgttttaaaaaaaaaaaaaagattgaggtttaagtaggttaaatattatatatatattagattatatattaagttatataggttgtatagaatagaaattttattttagggttttatagattttaaattgtttttgtaaatggtttatgtttattaatttatttttttaaagttaatatattttaaaaatagaattgttattattaaaatgtggttatatataatttaatatataagtgttttagaagaagggaattttattatttgattttttaaaatatagattttaatatttttgtgtgtgtgtgtttttttatgaatatggtaatattattggttttttttttaaagatatggtatgaaattaattttttgtttagagttaggattttgttttattatttagtttggtgtgtagtggtacgattatagtttattatagttttaaattttttagtttaagttttttttcgttttagtttttaaagtagttaggattataggagtgtattattatatttagttaattttattattattttttgtagaggtaggttttaaatttttggttttaagtggtttttttattttagttttttaaagtattggtattataggtataatttattgtatttggtagaaaattaatttttattataaaaattagaaagaaagattttattgtttgatggttaatattttgaattttattttaatttttggttttttatattatatgtaggtattagtgattttgtgttatttttatttttttagatttttttttttttataatttttttatatgtgttattatttgaagttttgattatagttttgaattatttttatttttttgttttttttaattttggtttaaaatttcggtaatttatttgttacgaagtttagaattttttttgtaagtgagttgatcggttgggttaaatcgttttggaagggaaggattgttaggaagttagtatgttgttaagatgttttgttaatttgttgtgtaagttgtatagagtgttaggggatttttttttttattgatgaatttaggtgtgtgttatgatttgtattagtgattttatttggattgattaaggttgtaattttttatttatatgaatgttgtatttagtttttttttgtaattggttaaataaatgtttgttgtttgtattttaatttttagttaatatttgttggaagtgatttaatgtagttggagaatgatattaataattattatagtttgtaaagtgtgaaataattttattgtgttttgtggtttttttagtttgaggattgataatgtgtagcggatgagatttgaaaaaaacgtattttattataatttaagaaataatgtaaaagaggggtgagttttgaggtagttttatgttgtttgtttggtatgagtttgtttttataagaatttattttaagtgtggaagggaaatgtttttatttgaaagggatagttgtgttttatttcggtttttttttttatttgataaaaatttttgttgagtgatagtatagatgtagtttatttggaataagtgaaggaaaaggagaaaagggatgaggtggagcgaaggagtagttagttatgtttttaaagtttcgcggttttttttagtttttttatttaatttagcggttttggtgtttttttgtaaagtgagatgttttcgtttttggttttacgtttttattttcggagcgagttttttttatcggtggacgcgcggttttgtagtagttttttagagttatttgcgaagttgtttttgggggttatttttttcgggtttcgcggttgtcgcgtcggttggtttggtgttttattgattgggagtaggtgtgtttgttgtagaggttgggagttggagggtttggttcggtgtataaggcgatttatcgcggtgtttttgtggttataaagtaagtgaataagtgtattaagaatcgattagtatttcggcggagtttttgggttgagtttaacgtagtaaggttgcgttacgataatatcgtgcgcgtggtggttgttagtacgcgtacgttcgtagggtttaatagtttagggattattattatggagttcggtggtaacgttattttatattaagttatttatggcgtcgtcggttattttgagggggacgtaggggagttttattgtcgtattggaggatagttaagtttgggaaagtgttttaagtatttattagatgttgtgaacggtttgttttttttttattcgtaaagtattgtgtatttggatttgaagttcgcgaatattttgattagtgagtaggatgtttgtaaaattagtgatttcggttgttttgagaagttggaagatttgttgtgtttttagatatttttttattttttaggaggtatatatatttatcgcgtttcggagtttttgaaaggagagggcgtgacgtttaaagtcgatatttatttttttgttattattttttggtaaatgattattaagtaggcgtcgtattcgggggagcggtagtatatattgtacgcggtggtggtttacgatttgcgttcgttttttttcgttgtcgttttcgaggattcgtttttcgggtagcgttttggggacgttatttagcgttgttggagatttagcgcggcgtagaggtcgagcgcgcggttgtttttggtggattttatttttttgaaagttgaattcggttgattgaaaatttggttaagataagtttttgtttgattttatttgtttttaaaggaagtggagatgtcgaagaaaatatatttgtaggatggagttttagaaaataaagttattaaaaatttttttagtttttagtgttttttttaggatatattagtaaagttataagtttagtatttgttgttttagtattgttagtaattaattttatttatatagttatgtgttttgttttttattgttagtattttatttatttaaatttgttattgataaaagtttgtttaaaatagaattttattgtagaaatgttaaaattttttataaatttatatatattttatatttattatataaattttaattattaatggtgtagttgtttttatattaaattagtaaaaatttttaaaaaaataagtaatgtttttttattattttttttagtaaaattttttgtttgtaatgatttttatttataaaagttatatattgaggtatatttatatttaaaggaattatattataaatgatttattgtaatatttttaatttgtgtattgtaatgagtagaaatattttgttaaaatatttttaaattgggttatttttatttggtattgggatttagaagtagaagataaagattatatgatgtgagaggaaaatgtaggagtagaaggtaaagattatatgatgttaggaattatgaaatttaatatttggatggaagagaatagataaatagaattagattgtttattttagatattaaaataatggatgttggtatataggatttaaaggagaaggtgattggattttgttattgggatagttttgatttttttttagtaatagtagtttttgtgtatggtggaaagtaaggttgatgtaatggttggtagagggaatggtaaggttttgaagtagaggttgtgtatgtattgttaaggagggagaggtaggaagtttaaaagggggttagagatatagaaatgtt

SEQ ID NO: 174 - DNA, 7040 bp, Artificial Sequence
  chemically treated genomic DNA (Homo sapiens)
aatatttttgtgtttttgatttttttttaagttttttgtttttttttttttaatagtgtatgtatagtttttgttttagggttttgttattttttttgttagttattgtattagttttgttttttattatgtatagaaattgttattgttaaaagaaagttaaagttgttttaatgataaaatttaattatttttttttttaaattttatgtattaatatttattgttttgatgtttagagtgggtaatttagttttatttgtttgtttttttttatttaaatgttaaattttatgatttttgatattatataatttttattttttatttttatattttttttttatattatataatttttattttttatttttgagttttaatattaggtaaaaatgatttagtttagaagtgttttagtaaaatgtttttatttattgtaatgtataagttaaagatattataataagttatttatgatataatttttttgaatgtaaatgtattttagtgtatgatttttatgagtgaaggttattataaataagaagttttattggggggagtagtaggaaagtattatttatttttttaaaagtttttattgatttggtgtgggagtaattatattattaatagttggaatttatgtggtaggtatgggatatatatggatttatagaaaattttgatatttttgtagtggagttttattttggataaatttttattaataataaatttaaataaatgaaatattagtaatggaaagtaaagtatatgattatatgaataagattagttattaatagtattgagataataggtattagatttgtagttttgttaatgtgttttagaaaaagtattggagattaaaggagtttttagtaattttattttttaaaattttattttataaatatgtttttttcgatatttttattttttttaaaaataaatagaattagataaaaatttattttgattaggtttttagttagtcgagtttagtttttaaagaggtgagatttattaaaagtagtcgcgcgttcggtttttgcgtcgcgttgggtttttagtagcgttggatgacgtttttaaggcgttgttcggggagcgagttttcgaaaacggtagcggagagggacgggcgtaggtcgtaggttattatcgcgtatagtatgtgttgtcgttttttcgaatacggcgtttgtttggtagttatttgttagagagtgatggtaaaggaataaatgtcggttttaggcgttacgttttttttttttaggagtttcggggcgcggtgggtgtatgtgttttttagagggtaagagggtgtttggaagtatagtagattttttaattttttagagtaatcgaagttattaattttatagatattttgtttattgattaagatgttcgcgggttttaggtttaagtgtataatgttttgcgagtggaggaagagtaggtcgtttataatatttagtgagtatttgagatatttttttaaatttaattgttttttagtgcggtagtgaggtttttttgcgttttttttagggtggtcggcggcgttatagatgatttggtgtaaagtgacgttgttatcgaattttatgatgatggtttttaggttattggattttgcgggcgtgcgcgtgttggtagttattacgcgtacgatgttatcgtggcgtagttttgttacgttgagtttagtttagaaatttcgtcgagatgttagtcggtttttggtgtatttgtttatttgttttatggttataggaatatcgcggtaagtcgttttgtatatcgagttaaattttttagtttttagtttttgtagtaagtatatttgtttttagttaatggagtattaggttagtcggcgcggtagtcgcggggttcgaggaagatggtttttagaagtagtttcgtaggtagttttgagggattgttgtagggtcgcgcgtttatcgatggggaaaattcgtttcggaggtaggggcgtagggttaggggcgagggtattttattttgtagggggatattagggtcgttggattgaatgaagagattaggggaaatcgcgggattttggaaatatgattgattattttttcgttttattttatttttttttttttttttttttatttgttttaaatgagttatatttgtgttgttatttagtaagagtttttattagatggagggagaaatcggaatgaagtatagttattttttttagatgaaagtattttttttttatatttgaagtgaatttttataaaaataagtttatgttagataaatagtatggagttgttttagaatttattttttttttatattattttttaaattataataaaatacgttttttttaagttttattcgttgtatattattagtttttagattaaagagattataaagtataatgaaattgttttatattttgtaggttgtaatgattgttagtgttattttttagttgtattaaattatttttagtaggtattggttaagagttaaaatgtaaatagtagatatttgtttaattaattatagggaaaaattaggtgtaatatttatatggataaaaaattgtaattttaattaatttaaatagaattattgatataggttataatatatatttaaatttattagtggaaaggagaattttttgatattttatgtagtttatatagtaaattagtaagatattttagtaatatattgattttttaataattttttttttttaaggcgatttggtttaatcggttagtttatttgtaagagagattttagatttcgtagtaaatgagttatcgaagttttgaattagagttgggggagataaaagaatagaaatgatttagagttgtgattagggttttaaataataatatatatgggagaattgtagaagaggaaaaatttgaagaaataaaaatggtataaaattattggtatttatatataatgtagaaaattagaagttggaatgaaatttagggtattggttattagataataagatttttttttttgatttttataatgaaaattaattttttattaagtgtagtgagttatgtttataatattagtgttttgggaggttaaggtggaagggttatttgaggttaagaatttgagatttgtttttataaaaaataataataaagttagttgagtgtggtggtgtatttttatagttttagttattttggaggttggggcgggaggagatttgaattgaggagtttgaggttatagtgagttatgatcgtgttattgtatattaggttggatgatggagtaagattttgattttaagtaaaaaattaattttatattatatttttggaaaaaggattaataatattattatatttatgagaaaatatatatatataaaagtgttaggatttatattttaaaaaattaaatggtaaagttttttttttttaaagtatttatgtgttaggttatgtgtaattatattttaatgatagtagttttgtttttgaagtatattgattttgagaaggtaaattaataaatatgaattatttatagaaataatttgaggtttgtgaagttttggaataggatttttattttatataatttgtgtggtttagtatgtgatttagtgtgtgtataatatttaatttgtttgagttttaattttttttttttttttgagatagagtttcgtttttgttgtttaggttggagtgtaatggtacgattttcgtttattgtaattttcgttatttgggtttaagcgattttttcgttttagtttttcgagtagttgggattataggcgtatgttattatgtttagttaatttttgtatttttagtagagatggggttttattatgttggttaggttggttttaaatttttgattttaggtgatttatttgttttagttttttaaagtgttaggattataggcgtgagttattatgtttggttaattttatggaatattttagtagaaagattgttgtgtgtaattgtgttaaattttaaatataaaaggatgttaatgaatagagaaaaagtaatataattatattttataataaatttatattgtaaaatttatttagtaattgttatttagttaggattataatttagggttttgaaatggttatataataggagtgttgtgaatattagtagaatgagagtgttttaattttttagatattatatataatgtaagataatgtgatttattatataatttttatttttaagataattgtatatataatttatttttaaagttggttttattttttatttaaaatataaggtattagtgaaaatgtggtattttgtgtatttataaattttaagtttattagatttattatttgttaatttgtttaagaatatttaattgaatatttaatttataatagtttttgtttttttttttaaggtattttaaaatattttttttatttagtaaattgtatttattttgaaagtaggatttatttttttattgatttttttttttcgtaatatagtgttaaatatattttttattatgtttttattttaattttgtttttttttttttgagatagcgttttattatgttatttaggttggagtgtagtggtgtgattttggtttattgtaatttttgtttttttggtttaagcgatttttttattttagttttttaagtagttgggattataggtatatattattatatttaattatttttgtatttttttgttgagatggggttttattatgttttttaggttggttttgaatttttgaggttaagcgatttgttcgttttagttttttaaaatgttaggattatagggtattgtgtttggtttttaattttaatgtttaattttgatttggttattaaatatgtgtgtattatgtaatattttggattttaaaaatgggtaaagttttagtatggtggtaaaaggttattaggggttagatggtttgggttttttattattttagtgtttgtttttttatttgtaaaatgaggaaaatatgtttattttaggattgttgtgaagagtaatagagttttaaatatttagattagggttttaatgttaattattatttataaaatttatttaaaaaattatgtgtatgggtttatacgaataagaaatatatttgttaggtagtattggtttaaaagtattttattagggttgaaataattcgtttttatgttaaattaatatataatttgagtatttttttgtttttgaattttgcggttaaaggtataaaattttgttgtattaatggtatagtatgtagtaaaaacgtgggtggaaggttaatattaatttgattaaatgtaatatgtttatgttattttttaaaggtaaagagtaaaatgtgttgataataaggaattttttttggaattatatatgaaataaaggagataagataaattgtattttttgaggagcgaaatgttttcgtgtttttagcgtataggttttacgtgttttgttttttgattggtagtatgattattaagatattttcgtattaaatattatatttattataagagtaataatagatatcggaacggatagttttttttaatttgattttaattagagtttgaggatcgcggatagtgggagaacgtttttttgattaacgtggttggttttttgggtacgttgggtttgagtcgttttagttttcggggcgcgtatcgggttttacgggtatcgtggacggcggggcgttgcgttttttttgttttttgtatttgttgcgttggggtcgaggaggtggttttgttttttttgattttttagtttttggaagataagtcgttttcgtcgttttttggttattcgtgggttcgttttcgggttcgttcgttggtgtttttgtgcgttttttagtgtacgggttttgggcgcgttggtgttcggaagtacgtgggcgaggtcgtcggttttcgaaagacgtttagagtgcgtttagtttgtttttttgcgtacgtaataaatttttttttttttttagagttattacgtcgttttttggaaggtagttttaaaaaggtttagaagtttaatagtagttttaatagtatataaaattttatcgacggcggtcgcgtttgcgtttgcgtatttttgacggtcgttcgagttttggtaggggatcgttaggttaagagatttcgggtgatagcggattcgagaggttatagtggattttagaggttatagtgcgaagagcgcgagtattgtaatcgtgtaagtgtggtattgttggttataatcgtggattttattgtcgaaattttatttttgttttttttaagattaaaaagttaagttgtagatgaatatatacgttttattaaaaatttttatataaagattatagatttaaatttgaaaaatatattaatttttttttattttagtgggattatattattgatattttaaaatttgaattttatatttagtaatataatatagatttgtttttatgttagtaaagtatatatatagttattttaatttttatatggtttatataatatggtcggggtagattttagtttgtggattgtatggagtacgtttttggatgtgattagcgtatattatttgtttttatgcggggaggttggggttggttgtttttattttgttttgatcgtttgggttttgtattttgattttggagatacgtaaataaaattttatttgtttaaatatagttaaattttataaaaggttttaagatatataaatgtgttttaaattggttttggaaatttttgaatttaatgatattttgtaagttttttatgtttttaagaatataaaatgtttatagatatttgaaattttgaaatttgatttgattaaaatgcggttgttttgaatgattttgtttaatttatgattatatattggtatttttttttaagttagattatgt

SEQ ID NO: 175 - DNA, 1303 bp, Artificial Sequence
  chemically treated genomic DNA (Homo sapiens)
cggaagggaaatgtttttatttgaaagggatagttgtgttttatttcggtttttttttttatttgataaaaatttttgttgagtgatagtatagatgtagtttatttggaataagtgaaggaaaaggagaaaagggatgaggtggagcgaaggagtagttagttatgtttttaaagtttcgcggttttttttagtttttttatttattttagcggttttggtgtttttttgtaaagtgcgatgttttcgtttttggttttacgtttttattttcggagcgagttttttttatcggtggacgcgcggttttgtagtagttttttagagttatttgcgaagttgtttttgggggttattttttttcgggtttcgcggttgtcgcgtcggttggtttggtgttttattgattgggagtaggtgtgtttgttgtagaggttgggagttggagggtttggttcggtgtataaggcgatttatcgcggtgtttttgtggttataaagtaagtgaataagtgtattaagaatcgattagtatttcggcggagtttttgggttgagtttaacgtagtaaggttgcgttacgataatatcgtgcgcgtggtggttgttagtacgcgtacgttcgtagggtttaatagtttagggattattattatggagttcggtggtaacgttattttatattaagttatttatggcgtcgtcggttattttgagggggacgtaggggagttttattgtcgtattggaggatagttaagtttgggaaagtgttttaagtatttattagatgttgtgaacggtttgttttttttttattcgtaaagtattgtgtatttggatttgaagttcgcgaatattttgattagtgagtaggatgtttgtaaaattagtgatttcggttgttttgagaagttggaagatttgttgtgtttttagatatttttttattttttaggaggtatatatatttatcgcgtttcggagtttttgaaaggagagggcgtgacgtttaaagtcgatatttatttttttgttattattttttggtaaatgattattaagtaggcgtcgtattcgggggagcggtagtatatattgtacgcggtggtggtttacgatttgcgttcgttttttttcgttgtcgttttcgaggattcgtttttcgggtagcgttttggggacgttatttagcgttgttggagatttagcgcggcgtagaggtcgagcgcgcggttgtttttggtggattttatttttttgaaagttgaattcggttgattgaaaatttggttaagataag

SEQ ID NO: 176 - DNA, 1303 bp, Artificial Sequence
  chemically treated genomic DNA (Homo sapiens)
tttattttgattaagtttttagttagtcgagtttagtttttaaagaggtgagatttattaaaagtagtcgcgcgttcggtttttgcgtcgcgttgggtttttagtagcgttggatgacgtttttaaggcgttgttcggggagcgagttttcgaagacggtagcggagagggacgggcgtaggtcgtaggttattatcgcgtatagtatgtgttgtcgttttttcgaatacggcgtttgtttggtagttatttgttagagagtgatggtaaaggaataaatgtcggttttaggcgttacgttttttttttttaggagtttcggggcgcggtgggtgtatgtgttttttagagggtaagagggtgtttggaagtatagtagattttttaattttttagagtaatcgaagttattaattttatagatattttgtttattgattaagatgttcgcgggttttaggtttaagtgtataatgttttgcgagtggaggaagagtaggtcgtttataatatttagtgagtatttgagatatttttttaaatttaattgttttttagtgcggtagtgaggtttttttgcgttttttttagggtggtcggcggcgttatagatgatttggtgtaaagtgacgttgttatcgaattttatgatgatggtttttaggttattggattttgcgggcgtgcgcgtgttggtagttattacgcgtacgatgttatcgtggcgtagttttgttacgttgagtttagtttagaaatttcgtcgagatgttagtcggtttttggtgtatttgtttatttgttttatggttataggaatatcgcggtaagtcgttttgtatatcgagttaaattttttagtttttagtttttgtagtaagtatatttgtttttagttaatggagtattaggttagtcggcgcggtagtcgcggggttcgaggaagagtggtttttagaagtagtttcgtaggtagttttgagggattgttgtagggtcgcgcgtttatcgatggggaaaattcgtttcggaggtaggggcgtagggttaggggcgagggtatcgtattttgtagggggatattagggtcgttggagtgaatgaagagattaggggaaatcgcgggattttggaaatatgattgattattttttcgttttattttatttttttttttttttttttttatttgttttaaatgagttatatttgtgttgttatttagtaagagtttttattagatggagggagaaatcggaatgaagtatagttattttttttagatgaaagtatttttttttcg

SEQ ID NO: 177 - DNA, 2501 bp, Artificial Sequence
  chemically treated genomic DNA (Homo sapiens)
taagttttttatgtgtattttattgtgttgtttttttatttttagtttatttttttgtattttaatttggaaggtaagaatttaattaggatgtattgaataattggtagaaatttatgtgaatgtaattattttgtttagttttttaatttgtgttaagtttaggtaggtatttgaagaaaaaaaaaaaaaagtatgaaggaggtttttgtttaaatggtattatatttgggggattttgagtagggttgaaatagtttttgtaaaaattataattgaggaaattatggtagtgataaagattagatttaaatgatttagttttttttttaatttttatgttgtttttatttatttttgggtataggttaaattaattttagaaaggaatttagtttatggtttgatttagaaataaaattaataatagttttttttcgaaaagattttttttttgtttgggtgttagtttgtttttgtacgattaatttattagttataatattagaaattatggtttaggggttttgcggcgttaggttgtaagagtttgaatttttttaagttgttgttggggataatatcgttattgtaaaatttaatattttattttgtagattttgtattggatggattagttgatattatttagatcgtgtgtgatttggtttaattagttttgcgattttatttaggaatagaagattgtaagaaaacgttattttaatttttttgtgattttatttgtaatttgattaattagtattttttaagttttaagtttttatttgttaaattatttttaaaaatttttagaggtagggtgtagtggtttaacgtttgtaattttagtattttaggtggattacgagattaagagattaagattagtttggttaatatggtgaaatttcgtttttattaaaaatataaaaattagttgggtgtggcggcgcgtgtttgtaattttagttatttaggaggttgaggtaggagaatcgtttgaattcgtgaggtagaggttgtagtgagttaagattatgttattgtattttagtttgggcgatagagggagatttcgtttgaataaataaataaataaataattttcggaatgtttggggagattgatttgagtattggaattttagtattttaggaggttaaggtaggtggattatttgaggttaggagttttagattagtttggttaatatggtgaaatttcgtttttattaaaattagaaaaattagtcgggtgtggtggtgggcgtttgtaattttagtattttgggaagttaaggtaggtgaattatttgaggtcgggagtttaaggttagttttaaattggcgaaatttcgtttttattaaaaatataaaaattatttgggtatggtggtatgtgtttgtaattttagttattcgggaggttgaggtaggagaatcgtttgaattcgggaggcggaggttgtagtgagtcgagattacgttattgtatttcggtttgggtaatagagcgagatttcgttttaaataaataaataaaggaacgaaaattttcggttttcggtacggtaagttttgcgtgaattattttttttattgtaatttttttgttttgataaatgggttttgtttaagtagcgggtaaggtgaattcgttgggttgttataggattagtgatagattaagggtatgttattgaaggaatttttagacgtatttttttggatgtgagataggcggattttatttacgtttgttagtagtttttcggagaattgtgtttttgggttagttttggtttagaggagcgtcggggattcgtagagtgttgttgaagttaaggttataatttatttaggatttggggcgttagtttttcggtgggtagggcgttttttttttttatttttttttcgtacgatgatattaagtgtttggcgttgagttgttttataaaagttgttcggggaagttaggagagcgaagggcggacgtattcgttacggtatttaggttgcgcgtacgcggtttcggtgtgtagttggagagcgagcggttatcgggagttttcggtatagttcgcgttcgtttcgtaggagttcgcgaagatgtttcggcgtagtttgtacgcggcggtcgtgtttttgttggtgattttaaaggaatagttttttagttcggttttagtgaacggtaaagttttcgtttgttttttttttaatatttttgagcgtttagtcgtttttgggttgaaggttttttaatgataaagtaaaattattgttgcggggagtagggaaggtgtagtattaaatagtagatttttaagaaaggatgtttcgtttttttttgttgaggttgggtcgggaagtacgttgttttttagtggcgtttggcgtagatttggtgttaaaatgtttgcgtgtattttcgggtatcgttagttttgaagatgtggtttgggaatttgttaattagggaggagatgtaaagt

SEQ ID NO: 178 - DNA, 2501 bp, Artificial Sequence
  chemically treated genomic DNA (Homo sapiens)
gttttgtattttttttttggttagtaagtttttaagttatatttttagagttggcggtgttcgggagtatacgtaaatattttaatattaaatttgcgttaagcgttattagaaagtaacgtgtttttcgatttaattttagtaaaggaaaacggagtatttttttttgagaatttattatttggtattatattttttttgtttttcgtagtaatgattttattttattattgaagagtttttagtttaggggcggttgagcgtttaggagtgttaggaaagaagtaggcggaaattttatcgtttattggggtcgggttggaaggttgtttttttaagattattagtaggagtacggtcgtcgcgtgtaggttgcgtcggggtattttcgcgggtttttgcggggcgggcgcgggttgtgtcgggggttttcggtggtcgttcgttttttagttgtatatcgggatcgcgtgcgcgtagtttgggtgtcgtggcgagtacgttcgtttttcgtttttttggttttttcgggtagtttttatggagtaatttaacgttaaatatttgatgttatcgtgcggggagggggtgggggaggagaacgttttgtttatcggagggttggcgttttagattttaggtgagttgtagttttgattttagtagtattttgcgggttttcggcgtttttttgggttagggttgatttaggaatatagtttttcgaggagttgttggtaggcgtgggtgagattcgtttgttttatatttagaagggtgcgtttagggatttttttagtggtatgtttttggtttgttattggttttgtaatagtttaacgagtttattttgttcgttgtttagatagagtttatttattaagataggggagttgtaatggagaaagtaatttacgtagagtttgtcgtgtcggagatcggaggttttcgtttttttgtttgtttgtttgagacggagtttcgttttgttgtttaggtcggagtgtaatagcgtgatttcggtttattgtaattttcgtttttcgggtttaagcgatttttttgttttagtttttcgagtagttgggattataggtatatgttattatgtttagataatttttgtatttttagtagaggcggggtttcgttagtttaaggttggttttaaattttcgattttagataatttatttgttttggttttttaaagtgttgggattataggcgtttattattatattcggttaatttttttaattttagtagagacggggttttattatgttggttaggttggtttggaatttttgattttaaatgatttatttattttggttttttaaagtattgggattttagtatttaaattagtttttttaagtatttcgggagttgtttgtttgtttgtttgtttagacggagtttttttttgtcgtttaggttgaaatgtagtggtatggttttggtttattgtaatttttgttttacgggtttaagcgatttttttgttttagttttttgggtagttgggattataggtacgcgtcgttatatttagttaatttttgtatttttagtagagacggggttttattatgttggttaggttggttttgattttttgatttcgtgatttatttaaagtgttgggattataggcgttgaattattgtattttgtttttgggagtttttaaagataatttggtagataggggtttgggatttggggagtgttgattggttaggttgtagatgggattataggggggttgaagtaacgtttttttgtagttttttgtttttgggtgggatcgtagaattggttgagttagattatatacggtttgagtggtgttagttgatttatttagtgtagggtttgtaaaataggatgttagattttataatagcgatgttatttttagtagtaatttgggaaggtttagatttttgtagtttgacgtcgtaggatttttaaattataatttttaatgttgtaattaatagattaatcgtataaaggtagattggtatttaggtaagaagggggttttttcgggaaagggttattattgattttgtttttgagttaaattataaattgaatttttttttaaggttagtttggtttatgtttaggaatgaataaggatagtatgaaagttagaagaaagattgagttatttaggtttgatttttgttattgttataatttttttagttataatttttgtaaaggttgttttagttttatttagaattttttaagtatagtgttatttgggtaaaagttttttttatgtttttttttttttttttttaggtgtttgtttggatttagtataggttaaggaattggataagatagttatatttatatgagtttttgttaattgtttagtgtattttgattaagtttttattttttaagttgagatgtaaagagatgaattgagaataggagaatagtatagtggggtatatatgaagagttta

SEQ ID NO: 179 - DNA, 4165 bp, Artificial Sequence
  chemically treated genomic DNA (Homo sapiens)
tatttaggcgcgatgatttttgttgttagtagagggtatatttattttattttcgtaaatttgaacgcgggtgttgtttagagagggggcggagggaaagacgttttgtagtaaaatttagtatagcgattggttgtttttcgcgtttgcggtaaaggtttggaggtaggagtaatttgtaatttttaaagttgaattgtgtagtgtatcggatttggaagttattatatttatttaatatttgaacgttgagttgtaaatttaacgggtaataatttattttgaatagcgtatatgttatatacgtatttttttttttcgaattgtttttttttttggaggtggtggagggagagaaaagtttatttaaaatgtttttgggtgagggattaaggatgagaagaatgttttttgttttttatgtcgtggaataatataaaataaaaaatttcgagggaatatatattatatattaaatatagattattttagggagtaaataaattatgtgtggggttgggtaattagttaagtcgaagcgtaaataaaatgtgaatatacgtttgcgggttatatatagtgtatttttattagtatttagaaaaaattgtgagttagtgaattaggaaattaatgtttggaaggtagttaaattttaattagtttaagatttttttttttttaaaaaaaggtacggaagtaatatttttttttttttttttgattagaatcgatgtattttttgtgtatgatcgtatttttaataataaaaggggaaagaggatttggaaaggaattaaacgttcggtttgttcggggaggaaagagttaacggttttttttataagggtttttgttgattttttcggttcggtttataagttttttatttgttttttttaggaagttcggtttcgcggttcgggtattttttgttttttttatattttttcgtttagtatttttgattttttttaaattcggtagttcgagattgttgtaaatcggcgttatagggcgtaaaggggatttgttttttttgaaatttggttgagaaattgggaatttcgtgtgggaggcgtgggggtgggacggtggggtatagattggtagagagtaggtaatttttttttcgttttagtttagttttggaataggtagatatattttagggttaaatagacgtttttcgtacggggttttacggaagtttgagtaggcggggtaggaggggcggtatttgttgttttggtagtaaattgggggatttagtttgggtggaaggtatttaatttagatagttgtgtatatataatgtataatatatgattttttttaataaatgtaatgggagtttatttataacgcgttttttaagtatacgtggtaatgcgttgttgggttattttaattattttaggtatcgtttttttttttatgtttttattatttttttttatttatattaatattttacgttttgaacgcgcgtttattaatattttttttttttttattttttttgggatttttgattaaagcgcggttttttttttagttttagcgaggcgttttgtagtttggtacgcgcgtggcgtggcggtgggcgcgtagtgcgttttcggtgtggagggtagttgtttcgtttgcgatgatttatatttataggataaggatgcggtttgttaaatagtattgttacggaggagtagtagagaaagggagagggtttgagagggagtaaaagaaaatggtaggcgcgcgtagttaatttatgcggtttttttattttgtttatattttagagttagagtgttcggttgttcggttgagttttttttttattttttttattttttttattttttttataagcgtttttttcgggtttttaaagtagagggcgtgggggaaaagaaaaaagattttttttcgttaattttcgtttatcggttttttataatgcgagggtttggacggttgaggattttcgagttgtgttgttcgcggtcgttatcgtcgggtttcggtcgtttttggttttttttttgtttcgagaagggtagggttttttagaggtttggcgggaaaaagaacggagggagggatcgcgttgagtataaaagtcggttttcggggttttatttaattcgttgtagtaattttagcgagaggtagagggagcgagcgggcggtcggttagggtggaagagtcgggcgagtagagttgcgttgcgggcgttttgggaagggagattcggagcgaatagggggtttcgtttttggtttagttttttcgttgattttttagttagcggttcgtaatttttgtcgtatttacgaaattttgtttatagtagcgggcgggtattttgtattggaatttataatattcgagtaaggacgcgattttttcgacgcggggaggttattttgtttatttggggatattttttcgtcgttgttaggattcgtttttttgaaaggttttttttgtagttgtttagacgttggatttttttcgggtagtggaaaattaggtaagtatcgaagtttatttgttttttaatttatttttttattattttaatgttgagatgagtcgaatgtttaaatagggtgtttttttttttatttttgcgttattgatattttttttagagtagttatggtaattggggttggggtggggggtaatttagaattggatcggggtaaagtgatttgttaagatgggagaggagaaggtagagggaaaacgggaatggtttttaagattattttttcgagatttttgttttatgaatatatttacgttgattttcggtcggtcggatatttttgttttattgtgttaattgttttttgggttttggggggttgggggttgttttgcggtgggtagaaagttttttgtattttgagttttttggagtagggatcgtatatcgtttgtgtgagttagatcgtttcgtagtcgttgatttgttttcgttttcgggagggtatttaaatttcggtttatcgtatttttgatagtcggagacggatattgcggcgcgtttcgttcgtttgttttcgcggcgattttaattcgttttgatttttttaagaagttggtatttggttttttaaaaagtaataatataatttaaaatttgggtttttagaggtgttaggacgtggtgttgggtaggcgtaggtaggggaaaagggaggcgaggatgtgttcgatttttttggaatcgttgatttggaaaaattagggcgaattttcgtatttagttttgatttttttgtcgcggtcgttttcgggtgttttcgcgttcgagatgcggaggaattgcgaggagcggggttttgggcggttttagaatagttgttatttttggtggggtggtttcgggggaggtatcgtagcggggtttttggcgtagttgtattttcgtattgagtgcgaagggaggtgtttttattattatttgatattttttttgtatttatggaggggtgttaaagttcgcggttgagttcgttattttagtcggcgagagaaagaagaaaagttggtaaaaggagtgttggacgggggcggtattgggggtggggacgggggcggtggagagggaaggttgggaggggttgcggtgtcggcgggggtaggagagcggttagggcgcgagtgggaatagtcgtagcggaggggtttcggcgcggagcggggtttacgtagtcgttagcgtttaggcgtttttcgtttttttttttaggtggcgtaaaattttgtgttttggattttggtaaattgttttttttatcgttatttttcgcggttttttaagggcgttagggtcgatttcgatttttttgtcgttgcggggtcgattttcgggttttgcgtttcgggttttcgggggagcgggggttcggcgggtattaagtcgttggtttattaagtgcgttttcgagatagtaggggattgtttaaagggggtgaaagggtgttttttttatttttttattaagattatttagtcgttttaggggatagttttgtaaggggagaggttcgggattgtggcgcgtattgcgcgttgcgttaggttttcgtattaagatttttttaatttaagattgtttttcgttttgtgtgtttcgttttagt

SEQ ID NO: 180 - DNA, 4165 bp, Artificial Sequence
  chemically treated genomic DNA (Homo sapiens)
gttggagcggggtatataaagcgggaggtagttttgagttaaaggggttttggtgcggaaatttggcgtagcgcgtagtgcgcgttatagtttcgaatttttttttttgtagagttattttttaaagcggttgggtggttttggtgggggaataaagggagtatttttttattttttttggatagttttttgttatttcggagacgtatttagtgaattagcggtttggtgttcgtcgagttttcgttttttcgggagttcggagcgtaaagttcgggagtcggtttcgtagcggtagaggaatcgaaatcggttttggcgtttttaagaagtcgcgggaggtggcggtgaggaaaataatttgttaaaatttaaggtataaagttttgcgttatttgaaggagaaggcgagaggcgtttgggcgttagcggttgcgtgaatttcgtttcgcgtcggggttttttcgttgcggttgtttttattcgcgttttagtcgtttttttattttcgtcggtatcgtagttttttttaattttttttttttatcgttttcgtttttatttttagtatcgttttcgtttaatattttttttgttagttttttttttttttttcgtcggttggagtggcgagtttagtcgcgggttttaatatttttttataaatataaggggggtgttaaataataataggggtattttttttcgtatttaatacggagatgtaattgcgttagagatttcgttgcgatatttttttcggagttattttattaagggtagtagttgttttggaatcgtttagagtttcgtttttcgtagttttttcgtatttcgggcgcgaggatattcgagggcggtcgcggtaggggagttagggttgggtgcggagattcgttttggtttttttaagttaacgattttaggagaatcggatatattttcgtttttttttttttttgtttgcgtttatttaatattacgttttaatatttttagagatttaggttttaaattgtattattgttttttaaaaagttaaatgttaattttttaaaaggattagggcgggttggaatcgtcgcggggataggcgggcgggacgcgtcgtagtgttcgttttcggttgttagaaatgcggtgagtcgaaatttaaatgttttttcggagacggggataagttagcggttgcggagcgatttggtttatataggcgatatgcggtttttattttaaggagtttaggatgtaaggggttttttgtttatcgtaaagtaatttttagttttttaaaatttagagagtaattaatataataaagtaggaatgttcgatcggtcgggagttagcgtgaatatatttataaggtagaaatttcgaaagggtagttttaaaaattattttcgttttttttttgttttttttttttttattttgataagttattttatttcgatttagttttggattattttttattttagttttagttattataattattttgagaaaagtgttaatagcgtaggaatgggagaaaagatattttatttaggtattcgatttattttagtattaaagtgataaaaaaataaattaaaaggtaagtggatttcggtgtttatttggttttttattattcgaaaaaaatttagcgtttaagtagttgtaaggagagttttttagagaagcgggttttggtagcggcggggaagtgtttttaaatgggtagaatagttttttcgcgtcgggagagtcgcgtttttgttcgggtgttgtaagttttagtgtaaagtgttcgttcgttgttatgggtaaagtttcgtggatgcggtaagggttgcggatcgttggttgggggattagcgggagggttgggttagaggcgaagttttttattcgtttcggatttttttttttaggacgttcgtagcgtagttttgttcgttcggtttttttattttagtcggtcgttcgttcgttttttttgtttttcgttggaattattatagcgagttagataaagtttcgaaaatcggtttttatatttagcgcgattttttttttcgttttttttttcgttaagtttttgagaagttttgtttttttcgaggtaggaggggagttagggacggtcggggttcggcggtggcggtcgcgagtagtatagttcgggggtttttagtcgtttagattttcgtattataaagggtcggtgggcggagattagcgagagaggattttttttttttttttttacgttttttgttttgggaattcgggaggggcgtttatggggagggtggggagggtggggaaggtggggaggagatttagtcgggtagtcgagtattttagttttaggatgtaaatagagtaagagagtcgtatgaattaattacgcgcgtttattatttttttttgtttttttttaaattttttttttttttttgttgttttttcgtagtagtattgtttgataaatcgtatttttgttttgtgagtataaattatcgtaggcggaatagttgttttttatatcgagaacgtattgcgcgtttatcgttacgttacgcgcgtattaggttgtagggcgtttcgttaaggttggggaaagggtcgcgttttgattaagagttttagggagagtggaggaaagaagggtattaatgggcgcgcgtttagagcgtgggatgttagtgtagatagggaggaatgatagaggtataaggaggaaaacgatgtttagaatgattaaaataatttagtaacgtattgttacgtatatttggagagcgcgttatgaataaatttttattgtatttgttggggggagttatgtattatgtattatgtatgtatagttatttggattggatattttttatttagattgagttttttaatttgttgttaaagtagtagatatcgttttttttgtttcgtttgtttaggttttcgtggggtttcgtgcgggaggcgtttgtttagttttgagatgtgtttgtttgttttagagttgggttagggcgagagggaggttgtttgttttttgttagtttgtattttatcgttttatttttacgttttttatacggagtttttaattttttagttaggttttagaagagataaattttttttgcgttttgtggcgtcggtttgtaatagtttcgggttgtcgggtttgggagaaattaaaggtgttagacgggagaatatgggaggggtagggggtattcgaatcgcgggatcggattttttaaaaggggtaagtggagagtttgtggatcgagtcgggggagttagtagagatttttgtgaaaaaaatcgttaattttttttttttcggataaatcggacgtttaatttttttttaggttttttttttttttttattattggaaatgcggttatgtataaaaaatgtatcgattttgattaaagaagaggagaggagtattattttcgtgtttttttttgggggggggggagttttgagttaattaaaatttggttgttttttaggtattaattttttagtttattgatttataattttttttgaatattagtgaaagtgtattgtatgtaattcgtaaacgtgtatttatattttatttacgtttcgatttagttagttgtttagttttatatatgatttgtttgttttttgaaatgatttatatttaatatataatgtatattttttcgggattttttattttgtgttattttacggtatgaaaaataaaaaatattttttttatttttggttttttatttaaaggtattttaagtaaatttttttttttttttattatttttaaaagagaaaataattcgggggaaaggggtgcgtgtatagtatgtacgttgtttaagatgggttattattcgttgagtttgtagtttagcgtttaagtgttaagtgaatatagtagtttttaaattcgatgtattgtataatttagttttaaggattgtaaattatttttgtttttaggtttttgtcgtaaacgcggggagtaattaatcgttatgttggattttgttgtaaagcgttttttttttcgttttttttttgggtagtattcgcgtttaggtttgcgaaagtaaagtaagtgtgttttttattggtagtagagattatcgcgtttggatg

SEQ ID NO: 181 - DNA, 1501 bp, Artificial Sequence; identical to SEQ ID NO: 44
  chemically treated genomic DNA (Homo sapiens)

SEQ ID NO: 182 - DNA, 1501 bp, Artificial Sequence
  chemically treated genomic DNA (Homo sapiens)
tataatcgattatcgaattttcgtttttttttaattttattaatttataatttacgtttaattttcgcgtttcgaaaaatcgaatttcgaattaaaataataaaaaaaattaatcgtaacgcgcgaattcgattataaataacgaatttaaaataaattttattaacgtcgttcgaaacgtaatttttaaaattcgacgaaatcgaacgaaaacgcgtcgtatttaaaaaataatttataattaattcgtatcgcgaaattcgcgttcgtattttaattattcgtaattttatttcgttttaatcgttcgttatttaaaacgaatcgatttttcgtcgattcgaaataattcgataattaatatatacgtatatacgcgtcgtcgaaaacgcgattcgtatttataaacgcgtttttttcgcgcgcgcgttttttttcgttcgcgtacgacgattcgaacgttttcgaaatcgacgcgaaaacgcgaattataaacgtattattttttaattattttatatttcgtcgcgcgttcgaaatttaaaaattaaaaaacgaattttataaaataaatttcgttttttttttatttattacgaataatcgataaataaaatcgattttattttttaataacgttcgttcgtttcgtttaattttcgataattttttaaataaattatacgttaaaaaacgtaaataaaaaaaaaattaatacgattcgacgatcgtttaacgatattaatcgattaaattaaatcgtattttttatttatttcgaattaaaaaattaaaattatttttcgttttattttacgcgtttatttttttcgacgtatttcgttaaatttaaatacgttcgaatcgtcgcgaaaaataaaaaaaaaaaaacgcgttatttaacgatttttaattttaaatttaaattaatttcgacgttcgtttaattattcgtcgattcgttttttaaatttaataatttaaatttaaataatatcgaaacgaaaatttcgaaatttaaaattcgaaacgtaatttttttaaattttaattttatttataaaataaaaaaataataatatttattttataaaattattataaaattttaaaaaaataaaaatatttaaaaaaaaaatttaatttaaataaaaaaataaacgacgttaatttaattttcgttttaaaaaaacgatataaaaataaaaaattttttttaaaataaaattaattaaaattcgttatatttttttttattttatataaaatattataaaaattatataataaaaaataaaaatttaatatttaaaaaatattataaaattaaattattttaaattttattttatattattaattaaaataataaataatttttttatataattttttttttaaattttaaatatattttattaaaaaataaaattttatttaacgttaaaattaaaatataataattcgattataattcgttataatttcgaatttttaaatt

SEQ ID NO: 183 - DNA, 3025 bp, Artificial Sequence
  chemically treated genomic DNA (Homo sapiens)
tttttacgatttgatttttatagtcgttttatttatgggttttttataaattaggggtatagaggagtattgaaagttagtttagaggtgagcgcgcgtagttagcgtttttcgcggatatagtagtcgggtgttggagaggtttggaaagggcgtgtcggagagttaagtgttagtcgtttagggtttgtcggtcgttttttttttttttgttcggtaggggatttagcgcgtacgttagtgtggaggggcgggttggttggttagtttcgggtttttcggttatttcggggattttttttaagtttcgttttcgagtgtttttattggtttcggatttttttttttttagttgttcgtttgggtttcggggcgtttaggttattacggataaatagtttagggcgtttggtcgagaagttaggggtgaggaagttttggggcgttgtcgtcgttttttttaattataaattaggtcggataggagagggaggggtgggggatagtgggtggggatttagattgttagtattttgttatttatagtcggggttttcgagcggtagaaagtttcggttattttttgtcgtttgggttgggcgaaagttaggatcgtgtcgcgttatcgttaggatatggagttattgtcgttatcgtttcgcgacgtagatttgacggttttcgacggttttttttgtttttttgttataacggacgatttttatgacgattcgtgtttcgatttttcggatttgcgttttttcgaagatttggattcgcgtttgatgtacgtgggcgcgtttttgaaattcgaagagtattcgtattttttcgcggcggtgtattcggtttcgggcgtacgtgaggacgagtatgtgcgcgcgtttagcgggtattattaggcgggtcgttgtttattgtgggtttgtaaggcgtgtaagcgtaagattattaacgtcgatcgtcgtaaggtcgttattatgcgcgagcggcgtcgtttgagtaaagtaaatgaggtttttgagatatttaagcgttgtacgtcgagtaatttaaattagcggttgtttaaggtggagattttgcgtaacgttattcgttatatcgagggtttgtaggttttgttgcgcgattaggacgtcgcgttttttggcgtcgtagtcgttttttatgcgtcgggttcgttgttttcgggtcgcggcggcgagtattatagcggcgatttcgacgcgtttagttcgcgttttaattgtttcgacggtatggtaaggtcgggattttaggaagtgaggaagttagggcggcgttcgggatattagggacgcgttttcgagggcggggagttggttttgcgggaggtttgggttaggatttttttcgagagagaggatttttttgttttgggtagttgttattggggtagtttgttttggaagtgtgcgggtaagcgttcgagttgttttattgggggcgttattagaatattgtagcgcgaacgtgaagatttttttttttatttatttttatttttaaaatgtaaatttgcgttttttggtgattgttcgtttttggtttggttttgtatgttgtagattttattttttatttattcgtaattatttttttaattaggataggtttgggttcggaattagagttttaggttagagttagggagggggcggttataggaattggtgttcgggtttcgagtcgtttcgcgggtttgatttagtcgtttttgttgtttgtagatggattatagcggtttttcgagcggcgttcggcggcggaattgttacgaaggcgtttattataacgaggcgtttagcggtgggtatttcgggtttttttttgttcgtttttttttttttatggagttgttttggtttttatttaggacgtttttatttttatttatatacgtttatgttttgggaagtggtgtaggagatgaaatattaagtaagtagttttttgttttttcgattgtttcggattttaattaaagtttttagtttttaatttgttttaaagtattgggttcgggggtgggaggtttgtcgcggttttatttttgtttattaatcgagtttttttcgcgtagaatttaggttcgggaagagtgcggcggtgtcgagtttagattgtttgtttagtatcgtggagcgtatttttatcgagagttttgcggcgttcgtttttttgttggcggacgtgttttttgagtcgttttcgcgtaggtaagaggttgtcgtttttagcgagggagagagtagcggcgattttatttagttatcggacgtcgtttcgtagtgttttgcgggtgcgaattttaattcgatatattaggtgttttgaggggatggtggtcgtttattcgttcgagggatggtgtttttagggtttttcgcgtttaaaagattgaatttaaatgttttttttttaatagcgttttaaaagcgattttttttgaggtaggagaggcgggagaattgaagttttcgttttcgttttatagggtaaggatatagcgcggttttttttacgtagtatttttttcggagatttattgcgatggtcgtttcgtgtttttcggtgggttagagttgaattttgaggggttaggtttagttttttcgcgtttttttttatgggggtgagattttcgtagatttaattttgtttcgggatgtatcggttatttgggggggcgtgagatttagtgtatttcggttttaaatgtagtaggtgtaatcgtaatttatttttaattcgtttttcggtttaggattattttttgtaatatttttgtaatttatttttgtaaataagagttgttttgttagagtaggagtttttggggttgtatttatttttgaggtatggtgtgtggtgttatagggaatttgtacgtttatatcgtaggcgggcgagtcgcgggcgttcgtttaggtgattaaaataaaggcgttaatttatatcgtcgtggtttcggttttttttggatatgggtgtgggattt

SEQ ID NO: 184 - DNA, 3025 bp, Artificial Sequence
  chemically treated genomic DNA (Homo sapiens)
ggattttatatttatgtttagggaaagtcggagttacggcggtataaattagcgtttttattttgattatttgagcgagcgttcgcggttcgttcgtttgcggtataaacgtataaattttttgtagtattatatattatgttttagagataaatatagttttaggggtttttgttttggtaaagtaatttttatttataggaatagattataaaagtattataaaaagtggttttgaatcgggaaacgggttgggggtgggttacggttatatttgttatatttgggatcggagtgtattgggttttacgtttttttaaataatcggtgtatttcggggtagggttaggtttgcgagggttttatttttatgggggagggcgcgagaaagttgaatttagttttttaaggtttagttttggtttatcgaggaatacggagcggttatcgtaatgggttttcgagaagggtgttgcgtggaaaaaatcgcgttgtgtttttgttttgtggggcgggggcggaaattttagttttttcgttttttttattttaagagaagtcgtttttaaagcgttgttgggaggggggtatttaagtttaattttttgggcgcgagggattttaggggtattatttttcgggcgggtgggcggttattatttttttagagtatttggtatatcgggttggggttcgtattcgtagggtattgcggggcggcgttcggtgattgggtggggtcgtcgttgttttttttttcgttgggggcggtagttttttgtttgcgcggaggcgatttagaaggtacgttcgttagtaggagggcgggcgtcgtagggttttcggtggagatgcgttttacgatgttggataggtagtttaggttcgatatcgtcgtatttttttcgggtttgggttttgcgcggggagggttcggttagtaagtaggggtggggtcgcgataagttttttattttcgggtttagtattttgagatagattggaaattgaggattttagttagagttcgggataatcgaaaagatagggagttatttgtttagtattttattttttgtattattttttaggatataggcgtgtgtgagtgggggtgggagcgttttagatagaggttaggatagttttatgaaggaggaggagcgagtagggagaggttcggaatatttatcgttgggcgtttcgttgtagtaggcgttttcgtagtagtttcgtcgtcgggcgtcgttcggggggtcgttgtagtttatttgtaaatagtaagggcgattgagttaggttcgcgggacggttcgaggttcgaatattaatttttgtagtcgttttttttttaattttagtttaaggttttagtttcgggtttagatttgttttggttgggggggtaattacgggtgggtaggagatgaggtttgtaatatgtagggttaaattaagggcggatagttattaaggggcgtaaatttatattttggaagtagggataagtagagaaaaagatttttacgttcgcgttgtagtgttttaatagcgtttttaatggggtagttcgaacgtttgttcgtatatttttaaaataggttattttagtgatagttgtttaggataagggggttttttttttcgggaaggattttggtttaaatttttcgtaaggttagtttttcgttttcggaaacgcgtttttgatatttcgagcgtcgttttaatttttttattttttggggtttcggttttattatgtcgtcggagtagttggagcgcgggttggacgcgtcggagtcgtcgttgtagtgttcgtcgtcgcggttcgggggtagcgggttcggcgtatagaaggcggttgcggcgttagggggcgcggcgttttggtcgcgtagtagagtttgtaggttttcgatatagcggatggcgttgcgtaggatttttattttgggtaatcgttggtttggattgttcgacgtgtagcgtttgagtgttttaaaggttttatttattttgtttaggcggcgtcgttcgcgtatggtggcggttttgcggcggtcggcgttggtggttttgcgtttgtacgttttgtaggtttatagtaggtagcggttcgtttggtggtgttcgttgggcgcgcgtatatgttcgtttttacgtgcgttcggggtcgggtgtatcgtcgcggggaagtgcgagtgtttttcgggttttaggagcgcgtttacgtgtattaggcgcgggtttaggttttcgaagaagcgtaggttcggggagtcgaaatacgggtcgttatagaagtcgttcgttgtggtaaaggagtagagagagtcgtcgggggtcgttaggtttacgtcgcggagcggtggcgatagtagttttatattttggcggtggcgcggtacggttttggttttcgtttaatttaagcggtagagagtggtcggaattttttgtcgttcgggagtttcggttgtagatagtaaagtgttggtagtttgaatttttatttattgttttttattttttttttttttgttcggtttgatttgtggttaaggaaagcggcggtagcgttttagggtttttttatttttagtttttcggttaggcgttttgggttatttattcgtagtagtttaaacgtttcggagtttaggcgggtagttgggggagggggagttcgaggttaataggaatattcgggggcggggtttggggggggttttcggggtggtcgaggggttcgagattggttagttagttcgtttttttatattggcgtgcgcgttaggttttttatcgggtagggagggagggagcgatcggtaagttttaggcggttgatatttggtttttcggtacgttttttttaaatttttttaatattcgattgttgtattcgcgggaaacgttggttgcgcgcgtttatttttgagttgatttttaatatttttttgtatttttgatttgtgggggatttatgggtagagcggttgtagaaattaggtcgtgagag

SEQ ID NO: 185 - DNA, 3287 bp, Artificial Sequence
  chemically treated genomic DNA (Homo sapiens)
gaatatttttggtttagagtgttgtagatttatgaattgttgtttgttgaaataaggtgtaaagtttattttgtttaaagtttttaataggagtgataatttaggtaaaatgtttatataatagtgggaaattaaaagtttgcgatatagaaaagtgatatatatttgtaaatttttttaataaaggtatcgtagtataagtatgattgtagagttagattgttaatgtttaaattttttttgggttttaatttttttatttgaaaatcgttaatagtggaatttagttgatagggttgttgtggagtaagcgtttttaatttggagtttatgaaattttagtatttgtgaattttgtattgaaaaaatcgtaattttatgtttattaattttataatagtttcgtttttttgaattataaaggtaggtaataaattatagtagtattattagtatttataattttgttttttatagaaattatttttatatttagtaagttgttgtagatattttgaataattatacgtatatattttttaagtattatatatataatatttttatattttgtatatatttttggagatagggttttgttttgttttttaggttggagtgttgtagtatgatcggaatttattgtaattttaaatttttgggttttagtgatttttttagttttagttttggaatagttaggattataagtattttttattatatttagttgttaatttttttttttttcgtaaagataaggttttattattttgtttaggttgttttttaatttttggatataagttttttgtataggttttttaaagtattgggtttataggtgtgagttatcgtgtttggttaatattatgtatttaattttatgcgtttagaaatatgtgttattttaagaaggcgtttataggttttattatattattaaaggtgtttatggtataagtgaagaaatttttagatattagagtaataaaaattatgatgtattagaacggattaggtttatattaaacgtttaatatatagtttgttgttatggttttttttttttttttttttttttttttgagatagagttttattttgttttttaggttggagtgtagtggagtgatttcggtttattgtaatttttgtttttcgggtttatgttatttttttgttttagttttttaagtagaggaattgtaaggcgttttattatgttcggttattttttgtatttttagtagaaatggggtttttttatgttacggtaggttggttttgaatttttgattttaggtgagttatttgttttagttttttaaagtgttgggattataggtatgagttattatgtttagtttgttatggtttttaaaatatttatagaatagaaattgaagtaagtttattcgtttttatattaaaagtagttagtacggtgttttgtatttatgtattttatggatgttgaatgagttattgaatgaagtggagtttaggttgtgttttaggttttttagtggggttggaaggaatagttgtgaagttgtggggcggtttttgtgtatcgggggattttggagttagatggttttttagggttttgaaggagaagagttgtgtttttaataatgattttaatgggaatagagattgttggggatcgtaggggttaggttgttattttttaaagttttttttttattatttaagaaggtatttaggtttttttgtgttaggttttaggtaaagtgttggattatttagtaattgggtttagtagtaggatggttttagattgaggttttagggttaaaggattatttttttttttagcgttggttcgggaaaggtaagtttcgggcgggagcgtacgtcgcgttttcgaagtttggttttttcgttacgtttattttttgtttttatttcgcgtttttttaggttttttttcggtgaatcggatgttttgttagtttttttttttgcgttttcggtcgcggttcgggtttttcgtaaagtcgttgttatttcggagggtttagttagcgggttttcggaggttggtcgggtaggcgtggtgcgcggtaggagttgggcgcgtacggttatcgcgcgtggaggagatattgttttgtcgcgatgggggttcggggcgtttttttacgtcgtaggtaagcggggcggcggttgcggtatttgttttatcgggagttttttttttttttttttgttgttgttgttttgtatttagttcgggggaggatagaagaaaaaggaggtagaatggatttttttggtttttttttgtgggcgggggcgggttagggtgggtcgcgttgttaggtagttttgtcgtgttgttaggtagtttggtcgtcggcgtgggcgatgtcggcgttggggcgggagtcgcgagggtgggaggttttggggcgttttcgggacgtggagttagtagggttttgatttgaaaaacgacggtaaagcgtgtttttgattgtttttgagtattttatattttttagatttagggcgtttttatttttagttggaagtttagtttagagtaatggtgttattaaaaggggtgtgttggatgtgaaaatattttttggaagtatttataagtttgtaggaaatatgttttttttatttttttattttgttttttttattatttattttaagaagtaatagaatttgtgtagagtgtgttttaagttatattgtatgtttatttttgtttatgttgaattcggtgtatatttgtgagaataagtttgtattttttattttgtgtaagtataatagaatatattgagagtgtgttttaagttattttgtatgtttattttacgttgaatttagtgtatatttgtgaaaataatttgttatttattttatgtggatttatttttgaagtttatttaatttgattttaattttaatttattattaattttgaaaaggttgagatttgaagtgattggttgtatttaaagtaggtggagtgtttgtaagttttaattatttattatggatagttgatttagttgttttagtaaaaatagttatttcgggaatgtgattagggtttttaattgtggattattttggtgagagttatttgtttatataattgaagatagttttttttggttaagttgtatatttatatagggtttaaaatttgaattgggtttaagatattaataaaattttaatagttgggtagagatagtgaaaaaatatttttatatgtagagtgattgtttttt

SEQ ID NO: 186 - DNA, 3287 bp, Artificial Sequence
  chemically treated genomic DNA (Homo sapiens)
gggaaataattattttgtatatgagggtatttttttattgtttttatttagttattaaaattttgttaatattttaaatttaatttagattttgagttttgtgtaggtgtataatttaattaggaaaaattatttttaattatgtaagtagataatttttattaaaatggtttataattagaaattttagttatattttcgaaataattatttttgttgaagtagttagattaattatttatgatggataattagaatttataaatattttatttattttaaatataattagttattttaaattttaatttttttaaagttaatggtggattaagattgaaattagattgaatgaattttagaaataaatttatataaaataaatggtaggttatttttataagtatatattgagtttaacgtaaagtaaatatataggataatttaaaatatatttttaatatgttttgttgtatttgtataaaataaaaaatgtaagtttatttttataagtatatatcgagtttaatataaataaaaataaatatatagtgtaatttaaaatatattttgtataggttttgttgttttttgaaatgggtaatgaagggagtagagtaagaaaataaggaaaatatattttttgtaggtttataaatatttttaaagggtatttttatatttaatatattttttttagtggtattattgttttaagttgggtttttagttgggaataaaggcgttttgggtttgaaaggtgtgaggtgtttagaagtagttaagaatacgttttgtcgtcgttttttaagttagaattttgttaattttacgtttcggaaacgttttagggttttttattttcgcggttttcgttttagcgtcggtatcgtttacgtcggcgattaggttgtttagtaatacggtagggttgtttggtaacgcggtttattttggttcgttttcgtttataggggaaggttaaggggatttattttatttttttttttttttgttttttttcgagttggatgtagagtagtagtagtaggagaaggaagggaaagttttcggtggggtaggtatcgtagtcgtcgtttcgtttgtttacggcgtgaaggagcgtttcgggtttttatcgcggtagggtagtgttttttttacgcgcggtagtcgtgcgcgtttagtttttatcgcgtattacgtttgttcggttagttttcgggagttcgttggttgggtttttcgggatggtagcggttttgcgagggattcgggtcgcggtcgaggacgtagaggaggagattgatagagtattcggtttatcgggagaagatttggaaaggcgcgggatgggggtaggaagtgggcgtggcgagggagttaggtttcgggggcgcggcgtgcgttttcgttcggagtttgtttttttcggattagcgttgaggagaggagtggttttttggttttgggattttaatttgaggttattttgttattgaatttaattattgggtagtttagtattttatttggggtttagtatagaaagatttgaatgtttttttggatgatgaaggggaagttttggggaatgataatttggtttttgcggtttttagtaatttttatttttattgagattattattaggaatatagttttttttttttagagttttgggaaattatttaattttagagtttttcgatgtatagaagtcgttttataattttataattgttttttttagttttattggaaggtttgaggtataatttagattttattttatttaatgatttatttagtatttatggagtgtataagtatagagtatcgtattagttatttttaatataaaaacgaatagatttattttaatttttattttatgaatattttaagaattatagtagattggatatggtggtttatgtttgtaattttagtattttgggaggttgaggtaggtggtttatttgaggttaggagtttaagattagtttgtcgtaatatggggaaattttatttttattaaaaatataaaaagtagtcgggtatggtggagcgttttgtagtttttttatttgggaggttgaggtaggagaatggtataaattcgggaggtagaggttgtagtgagtcgagattattttattgtattttagtttgggagatagaatgagattttgttttaaaaaaaaaaaaaaaaaaaaaaaaagaattatagtagtagattgtatgttgaacgtttgatatgggtttgattcgttttaatgtattatggtttttattattttagtatttagagatttttttatttgtgttatgaatatttttggtaatgtgataaaatttgtagacgtttttttaaaatagtatatatttttaaacgtatgaaattaaatatatagtattagttaggtacggtggtttatatttgtaaatttaatgttttgggagatttatgtaggaggtttgtgtttaagagttggagagtagtttgggtaagatagtgagattttgtttttacgaaaaaaaaaaaaattaatagttgggtatggtggggagtatttgtagttttagttattttaagattgaggttggaaggattattagagtttaggagtttgaggttatagtgagtttcgattatgttatagtattttagtttgggagatagagtaaaattttgtttttaaaaatatatatagaatataaaaatattatatatataatatttaaggaatatatacgtataattgtttaagatatttgtaataatttattgagtatgaaaataatttttgtaggaaataaagttgtaggtattgataatattattgtggtttgttgtttgtttttataatttaaagaaacgaaattgttgtgaggttaatagatataaagttacgatttttttaatataaagtttatagatgttgaaattttatggattttagattaagaacgtttgttttataataattttattaattaggttttattgttaacgatttttagataaagaaattaaggtttagaaaaaatttgaatattgatagtttggttttatagttatgtttatgttacgatgtttttgttaaaggagtttataaatatatattatttttttgtatcgtaagtttttgattttttattattatgtgaatattttgtttgaattattatttttgttaaaaattttagataaaataaattttatattttattttagtaaataataatttataaatttgtagtattttgaattagaagtgttt

SEQ ID NO: 187 - DNA, 6343 bp, Artificial Sequence
  chemically treated genomic DNA (Homo sapiens)
gattgtttattttcgttattagttgaaggtaaggtcgttttgttacgagcgttttttaatttttataaaatgaaaagaaaaaaagggaggattattagtttattatttagaggaatggggaggttgtaaaaatcgtcgatgggtagaggtgaagatgtttttttcggattgtatttttcggtgttttgtaattagagtttagttgtgggatttgttgaagaaatttgatttttttgtttcggcgagattttaaaaattagaaatagaaatttttagagttagagaggaaatataattaaatagtacgtgggtatttttttttttatttttttttttttaaataatattgttttgagtttttattgggtaaagagagaaagtttgagtttttacggatgttacgtggaggttagaaatggtttaaaatgtagatttttaattagtttttttcgtggttgaagaggttaattttttttataaaatgagtttatttgtcgattgttagttattttaaagtgaagggatttagtatttaaaataaattgagtaagtttgtttgtttgtttttattgttaatttaaatgaatttaaaatacggagtaatttaagaaaatatataatatgttttagatagtttttaaaagtagggaaagtttagtatttatatagtgattagggttagttttaagcgttaagtttttttaaacgtatttattttatgtatattttttcgagttattatatatttttaaaattgcgagtattggtatattgatttaggaagagtaatataatttttagagggaattttatttttaattagggattaaagagatgtttttttaatagcgggtttgagttttgtttttaagtaggaattaatattggtgggaaaattcgaatttaggagtaatggttgtgtttcggtattttttaaaaatatatattaataggatgtttttgagattgaaaaaatattgttttatatgtttggtagaagtttttatatttggttttttaggcgaattatatttatagtttttttatttagaggtaggatagagttaaaatattttgtttattattaaaatatatatttttgtttaagttaagaaattagaaaattagggtttagaagtaaggtatatttttcgagtgagaatatgttttgtaattttatatattttttgttttgtaggagtaaatgtggatttgagggaaatttttttttttatttttatttttatttcgtgtaatttaatattattttcgttaggaattttaatttcgttattttaaaaaatgagatattcgtgatttagggtgaatttgttgaatgtaggtatagtagaggaaattttagattttatgagcgtttgagttttgtttagtgtaaatttttcgtgaatattgggttagtgcgtggtcgtgtttatttgtgcgtcgatatttttagtatgtttggtttattcgttttgatttcgggcgcggtgttttagttaagttgggtttagcgtttcggttttttttagttgataagtttagttcgttcgttttcggttgtggtttttttatttttttttattagtttattttatttttttagatttttttttatttatttttttttatttttatcgcgtttatttttattttcgttttttatcggttttttattttttttttttcgtagtttttttttgttgtgatttttttttttaattttgtaggtttgaaagaaggttatatacgtacgtttatatttatattttatacgtttcgttttaaataattttatgaatattgttttttgtttcgttttttgggttattttttttgtcgtttttttttagttcgttttgatttgttttttaaaagtacgtttttgttttttcgttgttttggcgttttttttttgatttattagggttgtcgggttggcgtagattgttttttttttttttttattttatttttttttttggtttttttttttatagtgggagttcgtgtttttgtttttcggttggtttttaagtgtttcgttaggtttttttttttttcgttttttcggtttcggttttcgatttttcggttcgttggtatttgttttttttttttgtttcgtttttcgtcgtttttgttcgtttttttcggcgttcgttcgggcgttgtgttcgtttttggatcgttagtcgcgtagcgggttcgtcggcgttcgcgcgttattgtgtagtggagtttggtggaatttttgttgacgttacgttattttttatacggagtaggagtagagggaagagagagggatgagagggagggagaggagagagagtgcgagatcgagcgagaaagttggagaggagtagaaagaaattgttagtggcggttagatttcggaggttttagtgtattcgtggattttttcggaatttggtatttttaggagttttgtagtttttttaggttcggttttcgggcgtttgtcgtgtagtcggaggttcggttcgttggaaatcgtttcgggaagtagtgggacgcggagatagtagttttttttcggtagtcggtaagtggaggttatttatttcgtagggatgtgagataatgcgagtttggaaatttgttttatttcggagaatttttatcgtaggtgatttgtggtttttggggttaagtttcgtttaaggtaacgtagtcggtaaatagattttgtaaagttttgtttttttcgtttttcgttatagatattaataatttatagggtgttgaagtcgagagggaagttagatcgtggttggtatttaaaacgaggtatttttttttaaatttcggtgttaatattgtaggaataaattttcgggttaaggattagtatttttaagataaagggttgggtataaagttttagttattggaagattagttttttttttattgttatttattgggaaaaaaaagaaaagaaaaagattttattttaattggtagttagtgattttttaggtttaagcgaattatttgggagttaggtttggatgttaagtttttattatttttttggattgtaatttttttaaattgattattagttaattttaatttggtattttaggagatatattttaaatggatgtagagaattattttttagttggagattaagaaaaaaattttcgattttaaattttcgaaatatgttttttttttttagtttaattattttatttttttaagtaatttagaaattaaattattataaggtggtgtgatttttttttatttttttgtgtgagtattgttttattaaattaaacggaaaaaatttttattattataaatgtaaatattagaatttatatattttaaaatatttttatgaaaaattaatttgatttaaagaaatttttttgtatttgttttagtttattaattaaaattaaagatgtttttattatataaaatattattttggtagaaatttatttaaaatttaaatattaataatattaagaaaataaagtatataagtaaaataaattgaagatttttgttgatgtaatatgagtatataatattttaataattaaattttttttaaaaaattaaatagttattttatttgtggaatgttttattttaatttagtaaaattatatttaaattatttaggtgttttgttttttaagttaagcgtgtttgtttttaaatgtttttaaagtatttatattaattggttgtaaagaacgtatatatatggtaaaatatagaattgaattgagtagtattttaatttttttaaataattatttattataaattaatttattggttaattttataatttagtttatttaaaatatatgtttttgtgttgtttatttttaaattttttattaaagattttgttatggggtaataaagtgtatgaaaaggggggaaatgtgaaaggatttgggattattcgaattgtattttttttgtatttttagttttgcggtagttattagaaattattttttagtaaattgttttattttttagggtttgtttgtttgttttgttatggtttttcgtttttcgttagtcgtgtagtgttttttgtgtgtttataatataaaatttaagttggttaaaataagagtttttggtatatatattttaattagaatatgaattttgggggtgagaattattttttattaggaaaagttttttattttaatttgtgagattagttattgaagttagtttcgaagtttggtagttaaattttttatagaagatttgttttgatagggtaagtttaaggattagtaggcgggaattggaggtttttttttaaaaaattattttttttagttatttagatttagtttttttagtaggtttggttattaaatgaagtataaaaatgtaagttttaaggtttattttgattgtaaaataaatttttaagttataaggatatgtaggagtgagttaaggaatacgttttgattttttttttagtttttagagtggagttttatgagtttttgaagatttgttttgtattgttttgtttggtttttagtattgaagtacggggaagtggggggaagaatgtgtaataattgattgattttatattaagtaacgtaattttttttttttgtatattttattttttaaaaaaaataaataaataaaaattatttgtagttattatttgtagtgtttcggttattagttaataatgtagttagtttagatatataaaaaaaaaagattatcgaaatgatgatgatatgtaaatttttttcgaaattattataagtaaatatttgaagtttggattaataaaattttatttgtgttattttatatcgagttagtagaaagttgtgataatgaattttgtaatattttacgaatagatattttaattagggattaattttgtgattttattgtagaattattaaatttggagtcgttaaattgttatttttgggtttacgggtttataaggatcgaatcggtagagttttcgttcgcgttttcgttagcgggtgggggaatcgtttggtcgtttttattttggatttttacgttatagcgtcgggtagttttttttgtaggtagcgattttggttagaggttttttagggtttagttttttttaggagaggtcgagacgtagggaaacggtatttaggttagaggtaggttcgtagttttttgtttcgtttttgtgttttcgttaattcgataacgtttgtttttatttcgattttcgtattcgcgcgaagtgggtttttcggtcgtcggcgtattttggttagcgtggagagaggtaggcgttgagatcgaaggggtttagggagttttggattttttttttttgtttttaaagtaatcgcggtttttttatttattcggtggagtttttcgagatttatttttttcggtttgtttgtggtagagaagggggagcgcgttaaatgtttggttcgttgcgttgtggttgaaaacgtgaaaaagatttggttcgttcgggagagaaagggggagaattgggtagtagttatattagagttattttttcgtttttggcgggtagtaaattttttaagaacgtttgttttgttttttttagtttcgtttagtttatttagtgttttttttttgcgattttaaattatattttagggtaattatttgtagtaagtaaataaatggtcgggttagtatttttaggagaaagtgtggttaaatatggaaaagtggtttttgatggatgagaggttcgaatttagttcgtttttgaaatattttaggttaagagttcgttcgttttagaattatagaaaatcgagggaaattgttgtttaggataggggtacgttggcgttgatgttttataaatgtttatcgagttttaattaatggataagtattgaagggtggtttttgtatatagttttttaaagagaaaagttttttttatttatttattttcgttgttattgcgtttagatgagtttttaatttcggtatcgagatttttgaaagtaggtttatagtttttttagtatattgtggttttatagttttttaatttttgggtatttttgcggtaattttggagggagatttttttttgataaataaatgttttgggttcgaggttaggttggagatgttgttgtatatgttagaggttgttaggtcggaaaaatacgtttgaagtttagtatatagtaggcgtttaatagttagtgtaacgtagttttatttgagttttgtttattcgacggtcgtcgttttttatagtttttttttttttttgttttgtaga

SEQ ID NO: 188 - DNA, 6343 bp, Artificial Sequence
  chemically treated genomic DNA (Homo sapiens)
tttgtaaaatagaagagaaggaaggttgtaagaagcggcggtcgtcgagtgagtagggtttagatgagattacgttatattagttgttaggcgtttattgtgtgttaggttttaggcgtgttttttcgatttgatagtttttggtatgtgtagtagtatttttagtttagtttcgggtttaggatatttatttattaagaggggatttttttttagagttgtcgtaaaagtgtttagaggttagaggattataaagttatagtgtgttggggaggttgtggatttatttttaagaatttcggtgtcggggttaagaatttatttgaacgtaatggtagcgggagtgggtgggtggagaggatttttttttttgggaagttgtatgtaaagattattttttagtgtttgtttattagttggagttcggtaaatatttgtagaatattagcgttaacgtgtttttgttttagatagtagtttttttcggttttttgtaattttgaaacgaacgggtttttggtttagggtgttttaggagcgagttgagttcgggttttttatttattaggagttatttttttatatttagttatatttttttttagagatattaattcggttatttatttatttattataaataattattttaaagtatgatttaagatcgtagaggagagatattgggtggattgagcgagattgaggagagtagggtaaacgtttttggagggtttattgttcgttaaggacggagaaatagttttggtataattgttatttagttttttttttttttttttcgggcgagttaaattttttttacgtttttaattataacgtagcgagttaagtatttaacgcgtttttttttttttgttataggtaagtcgggagaggtgggtttcgaggggttttatcgggtgggtagaagagtcgcggttgttttaaagataagaaaagaaggtttagggttttttaggttttttcgattttagcgtttgtttttttttacgttaattagggtacgtcgacgatcggagggtttatttcgcgcgggtgcggggatcggggtgggagtaagcgttgtcgggttggcggaggtatagaggcggggtagggagttgcgggtttgtttttggtttgagtatcgtttttttgcgtttcggttttttttgaagggagttgggttttggggagtttttggttaaggtcgttgtttataggaggggttgttcggcgttgtggcgtggggatttagggtggggacggttaggcggtttttttattcgttagcgagaacgcgggcggggattttgtcgattcgatttttgtgggttcgtgggtttagaagtagtagtttggcggttttagatttagtgattttgtagtaaaattataggattagtttttgattgagatgtttgttcgtgagatattataaaatttattattatagttttttattaattcgatatgaagtaatatagatgggattttattagtttagattttaaatgtttatttatgataatttcggaggaaatttgtatgttattattatttcgataattttttttttttatatgtttgaattggttgtattattagttggtagtcggagtattgtagatggtaattgtaaatagtttttatttatttattttttttaaagaatgaaatatataaaagaaaaagattgcgttgtttggtgtaaagttagttaattattatatatttttttttttattttttcgtgttttagtgttgaagattaaataaagtaatataaaataaatttttaagaatttatagagttttattttaaggattgaaaagaaggttaaggcgtgttttttagtttatttttatatgtttttgtgatttggagatttattttgtagttaaaatgagttttgagatttgtatttttatgttttatttaatgattaggtttattagaagaattgagtttaaataattggggaagataattttttaaaaagagatttttaattttcgtttgttgatttttaaatttgttttattaagataagttttttgtgagaaatttggttgttagatttcggaattggttttaatggttaattttataaattgagatgggagattttttttgatgggaggtagtttttatttttaaagtttatgttttagttggaatgtatatgttaaggatttttgttttggttaatttgggttttatattgtgagtatataaaaagtattatacggttaacggaggacgaggaattatggtaaagtaggtaggtaagttttaagaaataaaataatttgttaaaaaataatttttgatgattatcgtaagattgaaagtgtaggaaaaatatagttcgaataattttagatttttttatattttttttttttttatatattttgttattttataataaaatttttaatggaaagtttaaaaataaatagtataggaatatgtgttttaaatgaattaaattgtgaaattagttagtaaattaatttgtagtaagtaattatttaaggaaattaaaatattgtttagtttagttttgtattttattatgtgtatgcgttttttataattaattaatataagtgttttaggaatatttgaagataaatacgtttaatttaaggaataaagtatttaaataatttaagtgtaattttgttgagttaaagtaaaatattttataaatgaagtggttatttaattttttagggaaagtttggttattgaaatgttgtatgtttatgttatattaataaaaatttttaatttattttgtttatgtgttttgtttttttgatattattggtatttgaattttagatggatttttgttaaaatgatattttgtgtgataaaagtatttttagttttgattgatagattaaaataaatgtaaggaaatttttttaaattagattaattttttataaaaatattttagaatgtatgaattttgatatttatatttataatggtaaaagtttttttcgtttagtttagtaagataatatttatataaaagagtaaaaaaaaattatattattttatgatagtttgatttttaaattgtttaagaaagtaaagtggttaaattggaaaagaggaatatatttcggaggtttagaatcgaaaattttttttttaatttttagttggaaaataattttttgtatttatttaaagtgtattttttgaagtgttagattggagttgattggtgattaatttaaaggagttataatttaaagaaatggtgagagtttggtatttaggtttggtttttaggtaattcgtttgggtttgagaggttattaattgttagttaagatggaattttttttttttttttttttttttaatggataataatgggaagggggttaattttttagtagttgaaattttgtatttagttttttattttgagaatgttaatttttggttcgaggatttgtttttgtagtgttggtatcgagatttaagggaagatatttcgttttaaatgttagttacggtttggtttttttttcgattttagtattttgtagattgttagtgtttgtggcgggggacgaaaggaatagggttttgtaaggtttgtttgtcgattgcgttattttgggcgaaatttagttttaaaagttataaattatttacggtgaagatttttcgaagtggaataaatttttagattcgtattattttatatttttgcgggatagatggtttttatttatcggttatcgggagagagttgttgttttcgcgttttattgtttttcggggcgatttttagcgagtcgagttttcggttgtacggtaagcgttcgaaagtcgggtttgagaggattgtagggtttttgagggtgttaagtttcgaaggagtttacgggtgtattggggttttcgaaatttagtcgttattggtagtttttttttgtttttttttagttttttcgttcggtttcgtattttttttttttttttttttttttattttttttttttttttttgtttttatttcgtgtggggagtgacgtgacgttagtagagattttattaaattttattgtatagtggcgcgcgggcgtcggcgagttcgttgcgcggttggcgatttaggagcgagtatagcgttcgggcgagcgtcggggggagcgagtaggggcgacgagaaacgaggtaggggagggaagtagatgttagcgggtcgaagagtcgggagtcggagtcgggagagcgaaaggagaggggatttggcggggtatttaggagttaatcgaggagtaggagtacggatttttattgtggaaaggaggattagaagggaggatgggatggaagagaagaaaaagtaatttgcgttaattcggtagttttaataaattaaagggggagcgttagggtagcggggagatagaaacgtatttttggggagtaaattaggacgggttgggaggaagcgatagggaaagtggtttaagagacggaataaaggataatgtttatggggttgtttgggacgaggcgtgtggagtgtgggtgtgagcgtgcgtgtgtgatttttttttaggtttgtagagttgaggaaagaggttatagtaaagagggattgcggagggaggaaagtgagagatcggtagagggcgggagtggaggtgggcgcggtggggatgggagaggatgagtgaagagaaatttagaagaatggagtgagttagtgggagagggtgggagggttatagtcgggagcgaacgagttaggtttgttagttggggaaggtcgggacgttgggtttagtttagttgggatatcgcgttcgaggttaaggcgggtggattaggtatgttgagagtgtcggcgtataggtgggtacggttacgtattgatttagtgtttacgaagggtttgtattggataaggtttagacgtttatagagtttagaattttttttgttgtatttatatttaataagtttattttgggttacggatattttattttttaaaatgacgaggttaaggtttttggcgaggatggtattaaattgtacgggatagaagtgggggtgggggagagagttttttttaagtttatatttgtttttgtaaagtaaagagtatgtgaaattatagggtatatttttattcgaaaagtgtgttttatttttgaattttgattttttgattttttgatttgagtaaagatgtgtattttggtagtgagtagaatattttggttttgttttgtttttgagtggaaggattataaatataattcgtttggaggattaggtgtgaaggtttttgttaggtatatgggataatgtttttttaattttaagggtattttgttaatgtatgtttttggaaagtgtcggaatatagttattgtttttggattcggatttttttattaatattaatttttgtttgagagtaaaatttaggttcgttattaaaaagatatttttttggtttttaattgagaataaagttttttttaaaagttgtattgttttttttaaattaatatattaatattcgtaattttagaaatatatagtgattcgggagaatgtgtataaaatagatacgtttaaaaaagtttggcgtttaaaattaattttagttattatataggtgttgggttttttttatttttgggggttgtttggaatatgttatgtgtttttttgaattatttcgtgttttgaatttatttgagttagtagtaaaaataggtaaataaatttgtttaatttgttttgagtgttaaatttttttattttgaaatagttaatagtcgatagatggatttattttatggaaagggttagtttttttagttacgaagaaaattgattagagatttatattttaagttatttttaatttttacgtaatattcgtgaaaatttaaattttttttttttatttagtggaaatttaaagtagtgttatttaaggggagagaaatgagggggaaaatgtttacgtgttgtttaattgtattttttttttgattttgagaatttttatttttggtttttgaaatttcgtcgaggtaagaaaattaaatttttttaataagttttataattgaattttagttataggatatcggaaagtgtagttcgagaaagatatttttatttttgtttatcgacgatttttgtagtttttttatttttttgagtaatgggttaataattttttttttttttttttttattttgtagagattaagaggcgttcgtagtagaacggttttgtttttagttggtggcgaggataggtaatt

SEQ ID NO: 189 - DNA, 5333 bp, Artificial Sequence
  chemically treated genomic DNA (Homo sapiens)
tgggatgtttgtttgtggttttagttatttgggaggttgaggcgggaggattttttgagtttaggagtttgaggttgtagtgagttatgatcgtgttattgtattgtagtcggagcgagagagtaagattttattagggtttataggaagttaattttttttaggattaaggatatgttatattagtttttttagtatttttttttttatattggaggtaggatatgttatatttggattttgggtttttttgggatatagtttgtaaattatttttttttgtgaatttatagtttagtaagtagggattggtatagggtaggttttaatatttatttgttaagtaatggtttggttaggttatcgtgattaaggtggagtaggaaggtttgaattttggtataaaaagaaagaagttttatatgtagatttcggggagtatgggagtgtaaggaagaaggggatagtatagagttatatgagggtaggggttttagagtattatagaggtgaggtttttagttttgtaggtttagaaagagtatgttttttgatttaggtatttggaattaatttgtttttttagggtttgagaaaatttgaatgtaattcgtgaattttttttgagaagtgttaatttttaataggattttggggtagtttgggagtaggttattttttaaagtaagtaaagaaatgaataaagtttttttagttttgtttttttagttaatcgtttttggttttcgaagttttattttgttatagtttatttttaggttttttgtgtagatggttgtttattatatttggtttttatggattgattttttaaaggtttgggagtattgattaggttggagggaagggtaggtttttgaggttttatagtttttaggaagttgcgtatttgtttaatttttgttttttattttgtagattgtaaggtttataagagttaggttttattattattttttttagtttgtttttaagttggaatagagtacggaatgggtatataggagttagtatagtggttgcgatggtttaagtttgaagtcggggcgttgatttagtgaggttatttggaattgtgtttttttttttttattagttgggagtttgatatgtttttttattggcgaagatttagttggttttttttttattttttttatattcgttttttagtttttttttttttttttgtttttattattttagatttattagtttttttagttgttatttaaggtattattttgtttttttatttttagttattggttttttaggatttttgaattaagttttttttttgtattttatagttattgttttagattagggtatttgtttttaggttgttagagtgattgttttattatgtatagttgatcgtgttgttttttggttttaaattttttagtaattttttattatttatagaattggtttaatttttttagttaggattttgttttagtatattttttgggtattattttttatgaatttttttttaaatttgaaaatggttaaaattagtttttaaataggtttttgtaagagttattttttttgttttaagtgtttttcgtattttattatttataattttaaatttttggtgaatttttattgtttttgtaggttttagttgtgggtttttttttttagaatgttttcgtttgtaggtttgtttttttattatatttacggtttttagaaagtaggggttgcgtgtggtttatttttgtacgtttagttttcggtaggacgtggtacgaagtagtgttagtgtgaacggatgaatggattaaagtcgggagtagggttgtttttttgtagttttgttttatttttttcgttttatcgtaagttagcggtaggtttgtagtttttcgtttttatttttttttcgttttgggcgtgtttttaaaatttatagtcggtttttttgttttttagaatcgtttttagtttttgttttattttttttttagaggcgggttttgagtcggtattttttttttcggatagtttaagggatttagttaattggtttacgttttttttttagtttttttttacgtattttaagatttaaatcgagaatcgaaattaagttggggtttatggagtttgtattcgttcgattttcgaggttttagtaggatttcgttcggttttaggagtttattatgttttttttcgagattttttttgaaggtcgttagtttagttttagttttagttttatagaggtattattgggttaggggatgatggggttaagttttgttggtttgttgtggtggggagaggcgggaagagagggtttaacggaggatttggttaagtattttagagagtgatataaagcgggaagtttagatattagggttttgatcgtttcgggtggggtagggaagggagggtaggatagagtagaaaagaggatacggaggagttggggcggtttcgttgggttgcggtttttttattgagtagttgggtaaggtgagaagggttagtggttttcgggtttgggttttttcgtttattttcgagttttgttttaattttgttttagatgtaggattttagattagggaggatggaggtagtatttttgttgcgttggtttggagttaggggtatgttttaggtacggtaaaattaaaattaattttttagattcgaggtgagaaattggtttagattgaagaggtatttttgttaaggttttttagtttatgtggtttttgtttaaggaagtttttttaacgaattttttttttgttatattttttttgtttattttttatttttttcgataaaggaattatttgggttttttgttttgttgttttttaggtttttttatttttttttatgaaagtatagaggatatcgtattatagtaatttttataaatattattataattaagaataatattatttaataatattaggtaatatttatgagtattttaaatgtgttaggtattgtattaagtattttggtttttttttgttgttgtttgtttgttttgttttgttttttgtttgtttgtttatttgtttgtttttgagacggagttttatattgtcgtttaggttggagtgtaatggtgcgatttcggtttattgtaatttttttttttcgggtttacgttatttttttgttttagtttttcgagtagttgggattataggttacgttattatatttggttattttttatatttttagtagagatggggttttattatgttggttagattggtttttaatttttgatttcgtgatttatttatttcggttttttaaagtgttgggattataggtatgagttattatgttcggtttgtttttgtattttataaaatgtggtaaaatatatttaatggataagtttttatgttaattatttataagtgtattatttagtggtattaagtagatttataatattgtgtaattattattattatttatttttagaatttttttattattttagaaattttgtattttttaaattataggggagggaaagatggtttgtttttatttttttagtttttttggttgggttatgaattaaatagtttatgaattaaatagttataaaatagattattagcggaaaatttatatttaattatatatgtatatttaggagttttataatatatgagatttaaagaaaggttagatgattgaagtttgtataatattttgagttacggaaaagagtttggagtttttgggtgatggtgataatataagttatgggagggtgaggagaggagttgtttggtgaatagaggttgttttgttatgtagattaaaagtttttagataataaaagttgtttggagtagtttttttttaatatagattattttattaatgtagatttttttttaagatataaatgttttttttttttataaaaggagagttttttagagttatttttgtattagtagttttttagaataattagtttaaaatatgttaaagaagtatattttaagagttttttgtagttatattttgaagtggtgtgttttgagttttagtaatgtaatagttttttatttttttttttttttagtttttggtaatttttaatttattttttgtttttatgaatttatttattttagatattttatgtaagtggaattgttattagtagaggattttgattgtaaattgtttaggtttttggtattttgaataaagaattggataaaatgtatagtaaagtaaggaaagagtgaagtaatgaaagtagagatttattgaaaatgaaagtatattttatagggtgggagcggttagagtagggtttaaggattttagttatagaattttttgggttttaaatattttttagaggttttttattggttatttggtgtttattttattggttgtagaaagtaattaattagacgtatttttaattttttatttgttttgtaggaaatggggtgatttgtaaagagagtagttttttttttttttgttattgaggtatggagagttgcggtttttttttcgatttagttttaggaagttagagggaatcggttttaggttttttgtttttagattttatttttttgttttagaattatatagtgtttgattttttgtgattggtttattttatttagtataatgttattgaggtttatttatgttgtagtatgtattagaattttatttttttttaacgttgagtaatattttattatatgtgtagattatattttgtttatttatttatttgttgatggatatttggattgtttttatattttgtttattgtgaatagtgttgttgtggatattgttgtataagtatttgtttgggttttgtttttatattttttggttatatatttaagagtggaatttttgggttatattgttgttttatgtttatttttttaatgaatttttaaattgtgtattaagtattttatatgaggttggtatttagtgtatttattttttaaattgagttttttgaaggtagaatgtattttatattttttatattttagagtttattattgtgggtgatgagaagtagatgtttaataaatggtgtagtgagagttggagggtttgaataaatgggggtattggggtgttgataagttagggttttgtattatttaatgattggttggaatggaatatgaggttttattttagggtttagttgtaagggtggttggtcggtaggtgggggtttttgggatttttttaggttttatttgtttttttggttttttagt

SEQ ID NO: 190 - DNA, 5333 bp, Artificial Sequence
  chemically treated genomic DNA (Homo sapiens)
gttgggggattagagaggtaggtgaggtttggagaagttttaaaagtttttatttatcggttaattatttttatagttggattttggagtaggattttatattttattttagttagttattggatgatgtaaaattttggtttattagtattttaatatttttatttatttaggttttttagtttttattgtattatttattgagtatttattttttattatttatagtaataggttttgagatataagaggtgtaggatatattttgtttttaaggaatttagtttggaaggtagatatattaagtattaattttatataaagtgtttaatgtatagtttgggggtttattaaagaggtaagtatggaataataatatgatttagaaattttatttttagatatataattaaaagatgtaaaaataaggtttaaatagatatttgtataataatgtttatagtaatattatttataatagataaaatgtagaaataatttaagtatttattaatagatgaatagataaataaaatgtggtttatatatataatggaatattatttagcgttagaaagaaatgaaattttgatatatgttataatatagatagattttaatgatattatgttaagtgaaataagttagttataaaaggttaaatattgtatgattttgaggtaggagaatagggtttggaggtagggaatttaaggtcgattttttttgattttttagaattaaatcgaaaggaaaatcgtaattttttatgttttagtaataaaaggaagagaggttattttttttgtaaattattttattttttgtagggtagatggaaaattgaaagtacgtttggttggttgttttttgtaattaatggggtgaatattaagtggttaatgggaaatttttagggggtatttggaatttagaagattttgtaattggggtttttgagttttgttttagtcgtttttattttgtggggtgtatttttatttttaataaatttttgtttttattgttttattttttttttgttttgttgtatattttgtttaattttttgtttaaaatgttaagaatttgaataatttgtagttaagattttttattggtaataattttatttatatgaaatatttagaataagtaagtttatagggatagaaggtagattagaagttattaagggttaggggaaggagaaaatgaggagttattgtattattggggtttaggatatattattttaaagtatgattgtaggaggtttttgaaatatatttttttggtatattttaagttggttattttgagaaattgttgatataggaatagttttgaaaagttttttttttgtaaaaaagaaaggtatttatattttaaaagaaaatttatattagtaaaatgatttatattaaaagagggttgttttagataatttttattatttaagaatttttaatttatatagtaagataatttttatttattaaatagtttttttttttatttttttataatttgtgttattattattatttagaagttttaagttttttttcgtagtttaggatgttatataggttttaattatttgatttttttttgagttttatatattgtgggatttttgagtatatatatgtaattaaatatgggtttttcgttggtaatttattttatgattatttaatttataggttatttaatttatagtttagttaaggaaattagaagggtggaggtaagttattttttttttttttatggtttaaagagtatagagtttttggagtaatgaaaaagttttggaaatagatggtggtgatggttatataatattgtgaatttatttaatgttattgaatggtatatttataaatggttaatataggaatttatttattaggtatattttattatattttgtaaaatataaaaataggtcgggtatggtggtttatgtttgtaattttagtattttgggaggtcgaggtgggtggattacgaggttaggagttagagattaatttggttaatatagtgaaattttatttttattaaaaatataaaaaatagttaggtatggtggcgtggtttgtaattttagttattcgggaggttgaggtaggagaatggcgtgaattcggaaggaggaggttgtagtgagtcgagatcgtattattgtattttagtttgggcgatagtgtgagatttcgttttaaaaataaatagataaataaataaataaaaaataaagtaaaataaataaataataataaaaaaaaattaaagtgtttaatatagtatttggtatatttgaagtgtttataaatgttatttagtattgttaagtaatgttatttttagttgtaataatgtttataaaagttattgtaatacggtgttttttgtatttttatgaaggggagtaaaagggtttgaaaggtagtagagtaagaaatttaagtagtttttttgtcgggggaggtgggaggtgggtaggaaaggtgtggtaagagaagggttcgttggggaggtttttttaagtagaaattatatgagttgggaggttttggtaaagatatttttttagtttgagttagttttttatttcggatttgggaagttggttttagttttgtcgtgtttgggatatgtttttggttttaggttagcgtaataggggtattatttttattttttttaatttgaagttttgtatttgaggtaaagttgaggtagggttcgagggtgggcggaagggtttaggttcggaggttattgattttttttattttgtttaattgtttagtggagaaatcgtagtttagcgaggtcgttttaattttttcgtgtttttttttttattttattttatttttttttttttgttttattcgagacggttaggattttggtgtttggatttttcgttttgtgttattttttagggtatttgattaaatttttcgttagatttttttttttcgtttttttttattatagtaaattaataaagtttaattttattattttttaatttaatagtatttttgtagggttggggttggggttgggttggcggtttttagagggggtttcggggggaggtatggtgggtttttggggtcgggcggggttttgttggggtttcggagatcgggcgggtgtaggttttatggattttagtttagtttcgattttcggtttagattttggagtgcgtgaagagaagttgaaggggaggcgtgagttagttggttgagttttttgagttgttcgaaaggggaggtgtcggtttagggttcgtttttggagaggaagtgagatagaagttgggggcggttttagggggtagagaggtcgattgtgggttttaaagatacgtttagagcggggaggaggtagaggcggagagttgtagatttatcgttgatttacggtaaagcgggagaggtagggtagagttgtaggggggtagttttgttttcggttttgatttatttattcgtttatattggtattgtttcgtgttacgttttgtcgggagttgggcgtataaagatgagttatacgtagtttttgttttttaagagtcgtagatgtaatggaagagtaagtttgtaaacggagatattttggaaaggagagtttatagttgggatttgtaaaagtagtggaaatttattagggatttagggttgtaggtggtggggtacgggggatatttgaaatagaaaagatagtttttgtaaaagtttgtttgggaattaattttggttatttttagatttaagagggaatttatgagaaatgatatttaaggagtgtgttaggataagattttagttgaggagattgaattagttttgtgagtgatgggaagttgttgaaggatttggaattagggaataatacgattagttgtgtatgatgggatagttattttgataatttaggagtaggtgttttggtttaggatagtggttgtgggatgtagaggagggatttgatttagagattttgggaagttagtgattggaggtgagggagtaggatgatgttttgagtgatagttggaaaggttggtggatttgaggtggtgggggtaggagggagggggagagttggagagcgggtatgaagagggtgaggggagagttagttaggttttcgttaatggaaaagtatgttagatttttagttggtaaggggaaaggggtatagttttaggtgattttattgggttagcgtttcggttttaaatttaaattatcgtaattattgtgttggtttttgtgtatttatttcgtattttgttttaatttagaaatagattagaaaggatgatgatagggtttggtttttgtaaattttatagtttgtagggtggagagtaggggttgggtagatacgtaattttttagggattgtaaggttttaggagtttgtttttttttttagtttggttagtatttttaggtttttagagaattagtttatgaaagttaaatatggtgggtagttatttgtataagggatttggaagtgggttatggtaggatggggtttcggaggttagaggcgattggttgaggaggtagagttggggaagttttatttatttttttgtttgttttggaagatagtttgtttttagattattttaaagttttgttggaagttaatattttttaaaggaaatttacgagttgtatttaggtttttttaagttttggagaggtaagttaattttaggtatttggattaaggggtatgttttttttggatttgtaggattgagggttttatttttgtggtgttttggggtttttgtttttatgtagttttgtgttattttttttttttttatatttttatgtttttcgaagtttgtatgtgaaatttttttttttttgtgttaaagtttaggtttttttattttattttgattacggtgatttggttaggttattatttaataaataagtattgagatttgttttatgttagtttttgtttgttgggttgtgggtttataaagaggaataatttgtagattatgttttagagaaatttaaagtttagatatggtatgttttgtttttagtgtgagagaaggagtgttgagaaggttgatatagtatgtttttgattttggagaagattggttttttgtaaattttgatgagattttgttttttcgtttcgattgtagtgtagtggtacgattatagtttattgtagttttaaatttttggatttaagagattttttcgttttagttttttaagtggttgggattataggtaggtatttta

SEQ ID NO: 191 - DNA, 5013 bp, Artificial Sequence
  chemically treated genomic DNA (Homo sapiens)
tagtatagagatgatgaatatttttgatattataataaaatgatttttaaaataatatttacgaaaaagaagttagggttgggatttagtggtttatgtttgtaattttagtattttgggaggttggggttagaggatcgtttgtggttaggagattgagattattttgggtttttataattattttttatgtagagatgtggtaagattttatttttatattaaaaaaaaaaaaatatttagatatattagattatacgttgtatgtttatttatatgaagattattgtttaggggtcgggtacggtggtttatatttgtaattttaatattttgggaggtcgaggcgggtggattttttgaggttaggagttcgagattagtttggttaatatggtgaaatttcgtttttattaaaaatagaaaaattagtcgggtttagtggatagcgtttgtaattttagttatttaggaggttgaggtagagaattgttttaatttgggaggtagaggttgtagtgagttaaaattatattattgtattttagtttgggtgatagagtgagattttatttgaaaaaaataaaaaaaaaaataaaaaattagattatattgtttagggataaatagttgataaaataatagagataagtaagatataattattataaaaattaggatttggggttgggggtggagagggaaggtttaagtggaaagaatggagtggtgataatgtgtgttaatttgggttatggtgattttggggttcgttttgtaattttttaaaatgagtatttatgtgttatttattttttagagggtagaatttttgaattaaaatgtttaagtaattatatattaaaaaaagaaaaaatatggatagatttgtattttaattaaaatatttaaaaaatagagataagggtttcgttatgttgttgagagtggttttaaatttttgggatttaattgattttttcgttttagttttttaaagcgttgagattttaggcgtgaattatcgcgttcgatttggaaagatatatatatatatatatatatatattttttttttttttttttttttttttgagatagagtttagtttttgttgtttaggttcgagtgtaatggttcgattttagtttattgtaaatttcgtttttagggtttaaacgatttttttgttttagtttttcgagtagttgggattataggcgttttattatattcggttaatttttgtatttttagtagagacgaggttttattatgttggttaggttagtttcgaatttttgattttaggtgattcgttcgtttcggttttttaaagtgttgggattataggcgtgagttacggcgttcggtttggataaattttttaaaatataaaagtttgagtgagtttttggtcggtcggtatagatgtcggggtggggtcgtgaatcggttgggacgcgttcgtttcggtttggggggattcgggttagtagtcggtcgtcgcgcgtgcgtattgggcggggggtttcgcgtttttatttgtacgtggttagcgttcggcgttgggtcgtagtttttgtcgtgtacgttggggagtcggtatatgtaggtgggaagttttatacggagaggcgcgtcgttttcgtgatagggttttatttggtatatcggtatggtagaattaaagtaaaagggggtagcgcgtgttaaaggttaacgtttagaaatcgttagaggttacgacggagatcggttattttttttttgattttgttgcgggcgttcgggaaaacgtagttcggtgtgttttgattggtttaggttttttgacgttacgaagtcgatttttgatagagttaataggcgaaaaggagagacgggaagtatttttgtcgtttcgttcggaaagggtggagtataacgtcgaaagtagttaatgggagtttaggaggcggagcgtttgtgggagttttggagggaatttttttagttttcgaggcggatcgggtgttgtatttatggagcgagttgagagttcgaggtgagcggggttcgtagtttttcggtgttttttttcgcgcgttttttttgagatttacggtattttaatttttttggaaatggggggaatatggtcgaggcgcgtggcgaggtagttttttggaggtttcggagtggcgattttagtgttgtagcgatttcgtgttttttgggtgcgttttgaggtcgaggtaagttttttcggggttttgggttgcgggtaaaggattcggttttgtgaggagttgggttcggtttgttttagataggttttgtttatattttattatagggtcgtggatttgaagcgggagcgtgaaatttttatagattgaatgtattttttttttatttgttttttttttttttttatttttatttttatagtattttatttttaatttttttttgtagagacggggatttcgttgcgttgtttaggttggtttcgaacgtttgagtttaagtaattcgttcgttttggttttttaaagtgttggaattaaaggtatgatgtatcgtgtttggtttttttaaaaaattaaggttattttggggacggtagagcgtttagatatatttttatttgtatagttgcgtagtttttaaaaatgtaatacgtttttatttgttaggatgtgtgatttttggttggtaagttatatcgaattttggttagtatatttgtattttatgttagatttgtaaacgtaaatttgttttttgtatttaaatatattagatatatttaggtaattatatttaaatgtattgagatatttaaataaatttggggtttgtgtttaaatgcgttttttttttaaaataaatatttgaagtgggtcgagagcggtgatttacgtttataattttagtattttgggaggttaaggcgggtggattatgaagttaggagtttatgattagtttggttaatatggtgaaattcgtttttattaaaaatataaaaattaattgggtatgatggcgggagtttgtaattttagttattttggaggttgaggtaggagaatcgttggaatttaggaggcggaggttgtagtgagttgagatcgtgttattgtagttcggtttgggtaacgtagtaagattcggttttaaaaaaaaaaaaaaaaaaaaattagaagtggatttgtagtttatagtgtgttgttaaataaatttatttttagagatatttttttttattttttgtgaggttatttgtagttttatatggtagatagatttaggtgagatttttagtaaggtggaatgaagagtaaagaggtttgtttattttagaagggtttattaaaggtttacgatgtgttaaatgttgtaggaaatatttagtgattttttttttatggaggttttttgtttttttttaataagttattaattaaattgtttgttggaaattgttaagttaatgaatatacgggatatattttttgagtagatattgtttgggtagaggaggaagaggagagcggtttagatagagatttgtttatatattgtagtgttttaaagagtttgtgatgtttaggatagttgtttattgtgttataatataggggatggttggttgcggttttttgtaattttagtattttgggaggtcgaggtaggcggattatttgaggttaggagttcgagattagtttggttaatatggtgaaattttattttttttaaaaatataaaaattagttgggtgtgatggtgggcgtttgtaattttagttatttgggaggttgagataggagaatcgtttgaatttgggaggcggaggttgtagtgagttgagtttatgttattgttttttagtataggtaacggggtgagattttgttttaaataataataataataataataataataataataataataataatgtaggggatttgatgaagggaaaggattagagagattttgaaaagaaggtagttttggttttaatgatgattaaattttaatttttatatagtaggaagtggggtattagtaaatttttaagtagaaaaattatttgattagatttgtgattttaaaaatagttttggtgatagagtggaggatgtattggagtagggaataaggggagataaaatttttataaaatttttaaagttagtatagtaagagttttgagggtttttgttaagatagtagttggtagttttagtttggagtggggtattaaaggtaattgtgtataaggaatagttatataattggtatttaatttttgagatgattttgatttaaatattgtgtattttttagtatattgttggtttttttaattatgttgggaaattatgttatttttatttttttttttgttcgttgtttaggttggagtgtaatgtcgtaattttagtttattgtaattttcgttttttggatttaagcgatttttttgttttagttttttgagtagttaggattataggtgtttattattatgtttggttaattttttgtatttttagtaaagacggggttttatcgtgttggttaggttggtgtcgaatttttgattttaagttatttatttatttttgttttttaaagtgttgggattataggtatgagttattatagttagttatgtttttattttttaagaaagaagatattattgttgttaaagattttggtaatttgagagatataatgtatgttttttttatgtggattttagtataattagatagtaaggatttgttgaatttgaagtatttatttagaagtattttgggtatatgtttaaggattgtaaaatagtgtttttatttttggatataataaatgtatttgttaatataataaatgaatagattagatttataaattatttatagtgttgagttattttttatagttaaaattaggatgaaaatatatagttgaatatttgatttgttttttgtaattgatttttttagt

SEQ ID NO: 192 - DNA, 5013 bp, Artificial Sequence
  chemically treated genomic DNA (Homo sapiens)
attagagaaattagttataagaaataaattaagtatttagttatatatttttattttgattttaattgtgggaaatgatttaatattgtaaataatttatgggtttaatttatttatttattatattagtaaatatatttattatatttagaaatagaaatattgttttataatttttaaatatgtatttaaaatatttttggatagatattttaaatttaatagatttttattatttaattatattaagatttatatggagaaaatatatattgtattttttaaattattaaaatttttggtaataatggtgtttttttttttgaaaagtgaaagtatggttggttgtggtggtttatgtttgtaattttagtattttgggaagtagagatgggtggataatttgaggttaggagttcgatattagtttggttaatacggtgaaatttcgtttttattaaaaatataaaaaattagttaggtatggtggtgggtatttgtaattttagttatttaggaggttgaggtaggagaatcgtttaaatttaggaggcggaggttgtagtgagttgagattgcggtattgtattttagtttgggtaacgagtaaaaaaaaaaatgaaagtaatataattttttaatataattagaaaaattaatagtatgttgggaaatatataatgtttaagttaaaattattttagaaattgggtattagttatataattattttttatatatagttgtttttgatattttattttaaattgaagttgttagttgttgttttagtaaagatttttaaagtttttgttgtattagttttaagagttttataaaggttttatttttttttattttttgttttaatatattttttattttattattagagttatttttgaaattataaatttggttaaataatttttttgtttaaaaatttattagtgttttattttttattatatgaaagttaaaatttagttattattggggttaaaattattttttttttagaatttttttaattttttttttttattaagttttttatattattattattattattattattattgttattattgttattatttgagatagagttttatttcgttgtttatgttagagggtaatggtatgagtttagtttattgtaattttcgttttttaggtttaagcgatttttttattttagttttttaagtagttgggattataggcgtttattattatatttagttaatttttgtgtttttagaagagatagggttttattatgttggttaggttggtttcgaatttttgattttaggtgattcgtttgtttcggttttttaaagtgttaggattataggggatcgtaattagttattttttatattgtagtatagtgaataattgttttgaatattataagttttttgagatattatagtgtataagtaggtttttgtttaaatcgttttttttttttttttttgtttaaataatgtttgtttaaagaatgtatttcgtgtgtttattaatttagtaatttttagtaaatagtttaattgataatttgttaagagaaggtaggaaatttttatgaaagagaaattattgggtattttttatagtatttaatatatcgtaggtttttaataaatttttttgaaataaataaatttttttattttttattttattttgttaagaattttatttaagtttgtttattatgtgaaattgtagatgattttatagaaaatggaaagaagtatttttaaaaataagtttatttggtagtatattataggttataggtttatttttgatttttttttttttttttttttgagatcgagttttgttgcgttgtttaggtcggattgtagtggtacgattttagtttattgtaattttcgttttttgggttttagcgatttttttgttttagtttttaaagtagttaggattataggttttcgttattatgtttagttaatttttgtatttttagtagaaacggattttattatgttggttaggttggttatgaatttttgattttatgatttattcgttttggttttttaaagtgttgggattataggcgtgagttatcgttttcggtttattttagatatttattttgaggagggagcgtatttagatatagattttaaatttatttaaatgttttaatatatttaaatgtagttatttaaatatatttaatatatttaaatgtagagagtaaatttgcgtttataaatttgatatggaatgtaaatgtgttagttaagattcggtgtagtttattagttagaaattatatattttaataggtagaaacgtattgtatttttaaaaattgcgtagttatgtaaataaggatgtgtttggacgttttatcgtttttaaaataattttaattttttaaaaaggttaggtacggtgtattatgtttttaattttagtattttgaggggttaaggcgggcggattgtttgagtttaggcgttcgagattagtttgggtaacgtagcgaaattttcgtttttataaaaaaaaattaaaaataaaatattataaaaataaaaataaaaggggagagagaataggtagaaaggaaatgtatttagtttatggggattttacgttttcgttttaagtttacggttttgtgatgggatgtgggtaaggtttgtttgggataggtcgaatttaattttttatagggtcgaattttttgttcgtagtttaggatttcgaaggagtttgtttcggttttaaggcgtatttaaggggtacgagatcgttgtaatattgaggtcgttatttcggggtttttagggggttgtttcgttacgcgtttcggttatgttttttttatttttagggaggttggaatgtcgtgggttttaaagagggcgcgcgagaggggatatcggaagattgcgagtttcgtttatttcgagtttttagttcgttttatggatgtaatattcgattcgtttcggggattgggaaagttttttttagggtttttataggcgtttcgttttttgaatttttattggttgttttcgacgttgtgttttatttttttcgggcggggcggtaaaaatatttttcgtttttttttttcgtttattggttttgttaaaggtcgatttcgtgacgttaaagagtttgggttaattagagtatatcggattgcgttttttcgaacgttcgtagtagggttagaagggaggtggtcggttttcgtcgtgatttttgacggtttttgagcgttggtttttggtacgcgttatttttttttgttttggttttgttatgtcgatgtattaggtaaagttttattacgggggcggcgcgttttttcgtgtggagttttttatttgtatgtatcggttttttaacgtgtacggtaggagttacggtttagcgtcgggcgttggttacgtgtaggtaggagcgcggggtttttcgtttagtgcgtacgcgcggcgatcggttgttggttcgggtttttttaggtcggagcgagcgcgttttaatcggtttacggttttatttcggtatttgtgtcggtcggttagggatttatttagatttttatgttttaaaagatttatttaggtcgggcgtcgtggtttacgtttgtaattttagtattttgggaggtcgaggcgggcggattatttgaggttaggagttcgagattagtttggttaatatggtaaaatttcgtttttattaaaaatatagaaattggtcgggtgtggtgaggcgtttgtaattttagttattcgggaggttgaggtaggagaatcgtttgaattttggaggcggagtttgtagtgagttgagatcgagttattgtattcgagtttgggtaataagagttaaattttattttaaaaaaaaaaaaaaaaaaaaaaaaaatatatatatatatatatgtatgtatttttttaggtcgggcgcggtggtttacgtttggagttttagcgttttgggagattgaggcgggaggattaattgaattttaagagtttgagattatttttagtaatatagcgagatttttgtttttattttttaaatgttttaattaaaatataaatttgtttatattttttttttttttaatatatggttgtttaaatattttggtttagagattttattttttgaaaagtgaatagtatataaatgtttattttgaggaattataaagcgaattttagggttattatggtttaggttgatatatattgttattattttattttttttatttaaattttttttttttatttttaattttaggttttgatttttatggtaattatgttttgtttgtttttattattttgttaattatttatttttaaataatatagtttggttttttgtttttttttttgttttttttagatggagttttattttattatttaggttggagtgtagtggtgtgattttagtttattgtaatttttgttttttaggttgaagtaattttttgttttagttttttgagtagttgagattataggcgttgtttattggattcggttaatttttttatttttggtagagacggggttttattatgttggttaggttgatttcgaatttttgattttaagagatttattcgtttcgattttttaaagtgttgggattataggtgtgagttatcgtgttcggtttttaaataatagtttttatataggtaagtatatagcgtatagtttgatgtgtttgggtgtttttttttttttaatgtagagatgaggttttattatatttttatataaaaggtggttatggagatttaaggtggttttaattttttggttataggcgattttttaattttagttttttaaagtgttgggattataaatatgagttattgggttttagttttggtttttttttcgtagatattattttaggagttattttattgtaatattagaagtatttattatttttgtatta

SEQ ID NO: 193 - DNA, 3683 bp, Artificial Sequence
  chemically treated genomic DNA (Homo sapiens)
ggtattagtttattggtggagacgttgtgtttaggtaggtgtttttttaaaagtattttatttaaattgttgtgattttaaaataggaatgttttgtagggttatttcgaaaagtttcgagatagttaattttttttaaaaatatagatggggttttgttatattatttaggttagtttttaatttttggttttaggggattttttaattttggttttttaaagtgttgggattataggggtgagttattatatttagttttttgagatagtttttattttagttatgtaagtatgagttttttttttttatatttttagggttttattttgggttaataaatagtgagtttattttggtatgtgtaatttttaaatatttatcgttataaaagaaaggattagttttggttaggtatagtggttgatgtttgtaattttagtattttgggaggtcgaggtgggcggattatgagtttaggagattaagattattttggttaatacgtgaaattttgtttttattaaaaataaaaaaattagttaggtatggtagcgggtatttgtagttttagtatttgggaggttgaggcgagagaatggtatgaattcgggaggcggagtttgtagtgagtcgagatcgcgttattgtattttagtttgggtaagagcgagatttcgttttaaaaaaaaaaaataaataaataaaggattagtttcgattgatagtcggtatttcgtaggtattttttataatttttttttttttttgttttttgttttataatttggttatgttatgatttttttttatttgtttttttttgtggattttatgattacgttttgttttatgaggttggattagggttatgtttatttattttttttttttttttgttatttgttttattttttaatttgttttttacgtatcgattttaatggagtaatagtaattagatgatgaaaataaataatggtggttagtttttaaatggattttttttttaatttcgtattatttatttgttgtttttttattagttttttgttttcgtttttttttttttttaaattggataagtatcgtatttcgtgaagatgtgtgtagtttgtttttatgttttgaatattatttttttaagtttttttggttgttttttgtttaggttttagaaaaggagagttgggtaatttttttagggagtcgttcgtttgtgtaatttttagtattagtttgtttgtttttttgagataattagttataacggttattttaaaataatggtttttttattttgttttttgtttttattttaaattttataaagttagaaatcgtaagtttttgagtatttatagttatttaaggataaatttttgttgaatgttttaagtaaagagggggaggttgagtttttgtttttagggtgaaaatacgacggtttttattagttttgttttatgcgataattttaggtcgaatttggattaatgtaatgattttttttgtatggatttatgttttgttcgtgtatttatttgtgtagttgggaattcgtagttttgtttattggtatggggatgtttcggggaatggtagggtagagttataaaaagttagttttattacgcggtttgttgtttttagttattatgtttattatagtttgtggtaggagatgttggggtttttttttcgattttttttaggaaaatagagtttgtggaggcggagtattttttaggtttgattgataaaataatttaaaagatttaaagagatttttcgtttgtttcgttttttgaagggttttgaatacggggttttttcgtttggtttttagttcgtttttttttttttattaggaaaggattttttttatttttgtagaagtttgattatttttttagagggtttgggaggaagtgggttttgtatatagtttttgttgattttagtgttttttgttggttttagacgcgagtttcggcgaggttttagggtatagttttttcgtagttagaagtcgggtttgtagcgttttagtatcgtttcgggatattttattcgttttttaggcgtgatttgttaataggtttgtattggcgataaaaggagtagttttgaatgtagggaaagtagggcggagttttttgtaggttcgggggaggggaggggcgtgaatgcgtggatttttgtggagagtggaaatacggggagtcgaggggagtatgcgcgggttttagaaagttttgggaaatcgatttttgggagtagggaggaacgcgcgttttagagagtaagttaattgattttcggggggtggtttttttagttcggggggttatagatagtaggtaaatttagagattatttagttaagggtaggggtattttttttagatttgcggggcggggtggggcgagatttgagtttaggggatttggaatcggtttttgtatttcgtattttattgaagaaaagggaggtcgttagaagtatagatttaggatagagtttagatttggacgttttcgtgattttagaatatttcgttttatatttttagttagtttttcgtttttttattcgtttatcgtattttttttttttattttgtttttattttattgtttggtgggaaaggtcgtagttattacgtatttatttatttttattttttattttttattttttgattttttttttatatttttatttttttttttattttttgttttttttttttttttttttttaattttttgttttttttatatatttttattttttttttaatttttgtttttttttatttttatttttattttgtttttttttttttattttcgttttggttcgttttttgtttttttttttttatttttattttttttttttttttgtttttttttttttatttttatttttttttcgttttgtttatttttcgttatttttattttttttttattttgtttttttttttttattttattttttttttattttttgttttcgtttttaatttttacgtttttattattttttgtttttttttttttatttcgattttttattttattttgtgtttttttttttatttttttttattgttttttttttcggttttttattttgttttttttttcgtatgtttattttttttttattttgtttttttttttttatgtttattttttttttattttgtttttttttttttatgtttattttttttttattttgtttttttttttttatgtttattttttttttattttgtttttttttttttatttttaatttttttttcgttttttttttttatttttattttttttttttttttatttttatttgttttttatttttagttttttttgttttttaatttttttttttttttttttttttttttgttttttttttttttgtttttttttttattgttttttttttattgttttttttttttttagtttttgaaaataagtttttttcgattttttgggcgattttattggatttcgtgagattttgttttggaaggattgagaaacggggattggttagattaggttgtttagtttttcggtttttatcgtcgtttttttcgttttacgtagcggttagggcgtttagttgagttattgtttcgttttttttttttagt

SEQ ID NO: 194 - DNA, 3683 bp, Artificial Sequence
  chemically treated genomic DNA (Homo sapiens)
gttggaaggaaagaacgagataatggtttagttaagcgttttagtcgttgcgtggggcggggggggcggcggtgggggtcggggggttgggtagtttggtttgattaattttcgttttttagtttttttagggtaaaattttacgagatttagtgaggtcgtttagagagtcgagaggggtttgtttttaaagattgggaggaggaggggtagtgggggaggggtagtggggggaggagtagaggagaagggagtaggaggaggggaaaaggggagaggaagttggagagtagaggaggttgggggtggggagtagatgggggtggggaaggaggggagatgggggtggggaaggggggcgggaggagggttaggaatgggggaaggaagatagggtgggggaggggtgggtatgggggaaggaagatagggtgggggaggggtgggtatggggaaagggagatagggtgggggaggggtgggtatgggggaagggagatagggtgggggaggggtgggtatgcgggaagggagatagggtggggaatcgagaagaaagatagtggggggggatggaggaaggaatatagggtggggtggggggtcgggatgggggaagggaaataaagagtggtggaggcgtggggattaggaacggagatagagggtgggggaggggtggggtgggggaagggagatagggtgggggaggggtgaggatggcggaaggtagataaggcgggggaggggtggggatgggggaagggagatagaagggggggaggggtggggatgggggaagggagatagaaggcgggttagggcgggaatgggggaagggaaatagggtgggggtggggatgagagaagatagaggttgggggaggggtggggatgtgtaagaaaaataaagggttggggagggggagggaaaagaggtagagagtgggggagggggtggggatgtggaaagaaagttagaaggtggggggtgaggggtggggatgggtgaatacgtgatggttgcggttttttttattagatagtagggtgggggtagggtggaaaaagggggtgcggtgggcgaatggggaggcggggggttgattgggagtgtgggacggggtgttttgggattacggagacgtttaagtttggattttgttttgggtttgtgtttttggcgattttttttttttttagtgggatgcggggtgtaggggtcggttttaggttttttgagtttaagtttcgttttatttcgtttcgtaagtttagaaaagatgtttttgtttttggttgggtaatttttggatttatttattgtttgtaatttttcgggttgaagagattatttttcgggagttaattaatttattttttggagcgcgcgtttttttttgtttttaggagtcggttttttaaaattttttgaggttcgcgtatgtttttttcgatttttcgtgtttttattttttatagaaatttacgtatttacgttttttttttttttcgagtttgtagaggatttcgttttgttttttttatatttagggttgttttttttgtcgttaatataaatttgttgataggttacgtttgggaagcgggtggggtgtttcggagcggtgttgaggcgttgtaggttcggtttttggttgcgggggagttgtattttgaagtttcgtcggaattcgcgtttggggttagtagggggtattagagttaatagggattgtatgtaaaatttatttttttttaggttttttagggggatggttaggtttttgtagagatggggaggatttttttttggtaaggggagagggacgggttaggagttaagcggaaggatttcgtgtttaaggttttttaagggacgggataggcgaggaatttttttgagttttttgaattgttttattagttaggtttgggaagtatttcgtttttataaattttgtttttttgaaaggggtcgggggggggattttaatattttttgttataggttatgatgggtatggtggttaagagtaataggtcgcgtggtgaggttggttttttgtggttttgttttgttatttttcgaggtatttttatgttagtgaatagagttgcgggtttttagttgtatagatgaatgtacgaataaaatataggtttatataaaggaagttattgtattgatttagattcgatttgggattgtcgtataaaatagggttgataaaaatcgtcgtgtttttattttggaaatagagatttagtttttttttttttgtttgaggtatttagtaaaggtttgtttttgagtggttgtggatgtttaaggatttacgatttttgattttataaagtttagggtgaaaataaaaaataaaataaggagattattgttttaaagtggtcgttgtagttaattattttaagaaagtaaataggttggtattgaaagttatataggcgggcggttttttgggagggttgtttagttttttttttttgagatttgagtagggagtagttagaggagtttgaagggatggtgtttagggtatgggaataggttgtatatatttttacggagtacggtgtttgtttagtttgagaagggaaagaaacgggagtagagggttgatgagaaggtagtagatggatagtgcgggattgaaaaggggatttatttgaagattggttattattatttatttttattatttgattgttgttgttttattgagatcgatgcgtggagaataagttggggagtggaataaatggtagggaggggagagaagtgagtgaatatgattttggtttagttttataggatagagcgtggttatgaagtttatagaggaggataggtagggaggaattatggtatggttaggttgtagggtaagaggtagagaggagagaggattgtggaggatgtttgcggagtgtcgattgttagtcgaggttggttttttatttatttattttttttttttgagacggagtttcgtttttgtttaggttggagtgtagtggcgcgatttcggtttattgtaagtttcgtttttcgggtttatgttattttttcgttttagttttttaagtattgggattataggtgttcgttattatgtttggttaatttttttgtttttaatagagatagggttttacgtgttagttaggatggttttgattttttgaatttatgattcgtttatttcggttttttaaagtgttgggattgtaggtattagttattgtgtttggttaaggttggtttttttttttatggcgatgggtgtttgaaagttgtatatattaaaataaatttattatttgttgatttaaagtaaaattttgagggtatgaaagggaagggtttatgtttatatggttgagataaaagttgttttaggaagttgggtgtggtggtttatttttgtaattttagtattttgggaggttaaggttggaggattttttgaggttaggaattgaagattagtttgagtgatatagtaagattttatttatatttttaaaaagggttggttgtttcgggatttttcgaaatagttttgtaagatatttttgttttggaattataataatttagataagatgtttttgaaagaatatttgtttaggtatagcgtttttattaatgaattgatgtt

SEQ ID NO: 195 - DNA, 4110 bp, Artificial Sequence
  chemically treated genomic DNA (Homo sapiens)
tagttttattttttaagggaaatgaaaaaataataaatttttagattggtgttgatgtttattttttttaagcgggtcgattatttgttttgtagatttttgacgggtggggtgcggggtaggagtgcgatttaatttttagtattttcgaattagtttttttacggtgataggttagtttaatcggggttgtaaatagatttgataggtttgttttgggttgacggttattgattaggtttttagattagataagttatttggttgagtttatagtaggtggggcgcgtttattagtttaggggtagtgattggacgtttgttgtaatatcggagaatgtacgttttgggttgtagtaggagatatttttaagtatagaattaaaagggtttattttaagcggtagggtattagcgatggagaggttcgagagttttagcgtttagtttttttttttacgtttgggaaggcgtagaataggtcgatgtagagtaaggagtgagttttaggttttagttttttggtttgtttttagggtagtaggcgaggagtggtattagtttggggatttttttttcgcgttttgtaagaatcggcggtagttagtaggcggggaggcgggggtacgtgtttggatgtgggtgtttgtgtaattagttttttaagcgttagtttcgatagcgttttttcgggaggttggttcgagtttttgttttcgtcgcggcgtaggaagggttggggtttcgttgtttgtattaggtaagagtatttcgagtaaaggaagaagacgatttgttttcggagttattattggggagtgggaatttggaaagttttttaattagggatatacgtgatttttttcggaaagtagtttcgattgtggttcgtgtatttttttatttttttttgaatttttttaggttttttcgtttcgtttattcgttgggttgtagttttttatcgtttcgtattttttatttaattcggtaattttaaacgtgtacggttcggtcggggcgcgcggagtttggtttcgggcgatttattttgtcgggtttttacggcggttaagggggggcggggttaggtggtttttgagaatcgagtttgatttcgacgtcgcgaatcgatttggagttcgaggggaaagatgttcgatttttttgggggtatcggagcgggcgtaggagaggtttgcggggtgcgttttatttatagggatttttttttagtttatttagataggtgttttttgggtttttgaaatttaacggttatgtgtttacgtttagtacgttcggttgagagtttttatttttagggtaaacgagtcgagttatcggggaagcgagaggtggggcgttgtaagggagtcggatgaggtgatatacgttggcgatataatagtaggttgttttttgtgttaagattgatattatgaggatatagatttgggggaagggggaatttttaggtaaaggttgttatagttaaatttttgcgaacgattgtgattcgatagcggtgtaaaaggaaagagcgaatgtagtttacgtcgcggaaatttaggggtagaggtaaggggggagggtattttttttgtagggatcgtttttgtatttttttttatattgagtagcgtggttatttggttttttttatttgtgtataggtaattttagattcgagttagtgatattgtttaacgtatttattttagtttttattattagttttttattttcgttttataatagtttattttgttttcggttgggtttttgggtagaggtcgaggtttagttcgttattttcgtttcgcgttgttgtaaaagtcgtagtaagtgtagttgtaggttggcggttgggaatcggttcgagtaagttttaggtagttatattgggtatgtttagtagagtttgcggtttggggattttgcgttcgtatttagagttatcgttttgtttttttttatcgttttttgttttgttttgtttttttttcgttcggcgcggtttcgttcgtttttcgttcgtttttcgttttttttcggtttttcgaggcgttcgggttttcggcgcggcggcggagggggcgggtaggtcggcgggcggtgatgtggcgggattttttatgcgttgcggtaggatacgcgttcggcgttgggacgcgattgcgtttagtttttttttttcggaagttgtagttatgatggaagtttgagagttgagtcgttgtgaggcgaggtcgggtttaggcgagggagatgagagacggcggcggtcgcggttcggagttttttttagcgtttgtgagtagtcgcgggggtagcgttttcggggagtcggtcggtttgcggcggcggtagcggcggcgtttttcgtttttttttcgttttttttaatcgtgtagtttttttttcggttttttttgaaagggaaggtggaagtcgtgggttcgggcgggagtcggttgaggcgcggcggcggcggcggtatttttcgtttttggagcgggggggagaagcggcggcggcggcggtcgcggcggttgtagttttagggagggggtttgagtcgtttgttattatttttagggttgggaacgtcggagagttggtttttttttttttattgtttttaatacggcggcggcggcggcggtatatttagggattcgggtcggttttaaatttttcgttcgtcgtcgtcgtatttttcgtggttcgggtttcggaggtcgtcggcggaggtagtcgttcggaggattattcgttttttttttatttcgttgtcgtcgttgttaggtttttggttgttgaggagaagtaggtttagtcgttgtaattatttagtagtcgtcgtagtagttattattcggttgcggtttagagttaagcggcggtagagcgaggggtattagttatcgttaagtttagagttatttttattttgtagaagaagtttcgttattagtagtttttgttatttttttttttttttttttttagttataggtttttagatatgatagttattattaaagagatcgttagtagaaataaaaggagatattaagaggatggattcgatttagatttgatttgtatttatttttgcggttgtttttttttatttttttgttatttttttagaacgtgggagtagacggatgcgaaaatgttcgtagtttgggtgattataatatttaattttggttaggttgttaggttatatattttgtgttttttttttgtgtatttaatttagggtgtgtttggttagacggaatttttgtttggttgtaagtgttaagttatcgattgtttttttaggttatttatatggtttttttttgagggttattgttcgttaatatagaatatagtatattgttagtggattagcgagttcggtaattcggttttttaaatgaataaaaaagtagacgttttttgaggttgagtatatttcgattaaattttggtttaggttttagattaagggtttagattagaataaaatgaaaattagtgttgtacgtacgtatattgtattagaattttgtagtgattgttttagttttttgagttgtattgatagatttttttaaaatatgattgatttgtataattttagaagtagaattatttttagtatatatggtgtatattgagggtaaaaagtagttttgttaatgtttaaatttaagttatttataattttgaattgtatgtagaagttttgtagtttgaagttaatagtgttataatatattttataaggcgtttttattagatttttgttatatttatttttttttttttttatggggtgatgtaggatagtgtttgaaatttgtattttagtagtatttaatgtttagtgtttttgttataaatatagaatggatattgagtagtttttgattttagatggtaatgtgtaggtttaagggtattgtgtgtagtaagtgaagattgtagaaataaaattttagtttatgtttgaaatttaagtattgttgtgatgttagaattgttgtttatcgtttttaggttttaggttttttgatattttttggtatcgttaattttattgatttg

SEQ ID NO: 196 - DNA, 4110 bp, Artificial Sequence
  chemically treated genomic DNA (Homo sapiens)
taaattagtaaaattaacgatattaaaaggtgttagaggatttgaaatttaaaaacggtgagtagtaattttggtattataataatatttaaattttaagtatgaattgaagttttatttttgtaatttttatttgttatatataatatttttgaatttatatattattatttgggattagaaattatttaatatttattttatgtttatgataagagtattgaatattaaatgttattgaagtgtaaattttaagtattattttatattattttatagggagagaaaaaggtaaatataataaagatttagtaagaacgttttataaggtatattatggtattattgattttaaattataaaatttttatatatagtttaaagttgtaggtaatttaagtttaaatattaataaaattattttttgtttttaatgtgtattatatatattgaaaatgattttgtttttaaagttatgtaaattagttatattttaaaagaatttattaatgtaatttaggaaattaaaataattattgtaagattttgatgtaatatgcgtacgtgtaatattaatttttattttattttgatttaaatttttgatttagggtttaagttaagatttaatcgaaatatgtttaattttaaaaagcgtttatttttttgtttatttaggagatcggattatcgagttcgttaatttattaatagtgtattgtattttgtattaacggataatagtttttaggaagagattatatagatagtttaagaaagtaatcggtggtttgatatttgtaattaggtaagagtttcgtttagttaaatatattttaggttgaatatatagaaaggaaatataaaatatatgatttagtaatttgattagggttaaatgttatagttatttaaattacggatattttcgtattcgtttatttttacgttttaagagagtgatagaaaggtaaagaggagtagtcgtagaaatggatataggttaagtttaagtcgaatttatttttttgatatttttttttgtttttgttaacgatttttttgatgatggttgttatgtttgggagtttgtggttgaagaaaaaggaggagagagatggtagaagttgttggtggcggggttttttttgtaggatggaaatggttttggatttggcggtagttgatgtttttcgttttgtcgtcgtttggttttggatcgtagtcgggtaatggttgttgcggcggttgttggatggttgtagcgattgggtttgtttttttttagtagttagaggtttggtagcggcggtagcggaatggggagaagacgaataatttttcgaacggttgttttcgtcggcggttttcggagttcgggttacggggggtgcggcggcggcggacgggaggtttaaaatcggttcgggtttttggatgtgtcgtcgtcgtcgtcgtcgtgttggaggtagtagaaggggagagattaatttttcggcgtttttagttttggaaatggtgataggcgatttagattttttttttggagttgtagtcgtcgcggtcgtcgtcgtcgtcgtttttttttttcgttttaggagcgggaggtgtcgtcgtcgtcgtcgcgttttagtcggttttcgttcgagtttacggtttttatttttttttttaggagaagtcgaggaagaggttgtacggttagaaaagacgaagaggaggcgagaaacgtcgtcgttgtcgtcgtcgtaggtcggtcggtttttcgagggcgttgttttcgcggttgtttataggcgttgagaggggtttcgggtcgcggtcgtcgtcgttttttatttttttcgtttgagttcggtttcgttttatagcggtttaatttttaaatttttattatggttgtagttttcgagaggagagaattgagcgtagtcgcgttttagcgtcgagcgcgtattttgtcgtagcgtataaagagtttcgttatattatcgttcgtcggtttgttcgtttttttcgtcgtcgcgtcgggagttcgggcgtttcggaagatcgaggggaggcgggaggcgagcgagaggcggacgggatcgcgtcgggcgaggggagggtagggtagggtagggggcggtaggagggggtagagcggtagttttgggtgcgagcgtagagtttttaagtcgtaggttttattgagtatgtttagtgtagttgtttggggtttgttcgggtcggtttttagtcgttagtttgtagttgtatttgttgcggtttttgtagtaacgcgaggcgaggataacgagttaagtttcggtttttgtttagaaatttagtcggaggtagggtaggttgttgtggggcgggggtggaggattgatgatgaaagttgagatgggtgcgttgagtagtgttattgattcgagtttgaggttatttgtgtataggtgaaaaggattaggtgattacgttgtttagtgtagagggaaatgtagggacggtttttgtaaggggaatattttttttttttgtttttatttttagattttcgcggcgtggattgtattcgttttttttttttgtatcgttgtcggattataatcgttcgtagagatttgattgtaatagtttttgtttagagattttttttttttttaaatttgtgtttttatggtgttagttttagtataaagagtaatttgttattgtgtcgttagcgtgtattattttattcggtttttttgtagcgttttatttttcgttttttcggtaattcggttcgtttgttttaaaaatgaaagtttttagtcgagcgtgttgaacgtgaatatatagtcgttgaattttaagggtttaaagggtatttatttaaatgaattgaaagaggatttttgtgagtgggacgtatttcgtaggttttttttgcgttcgtttcggtgtttttaagagagtcgagtattttttttttcgggttttaggtcggttcgcggcgtcggagttaagttcggtttttagagattatttagtttcgtttttttttggtcgtcgtgaaaattcggtaggatggatcgttcggggttaggtttcgcgcgtttcggtcggatcgtgtacgtttggggttatcgggttgagtggaaagtacggaacggtaggaagttgtagtttagcgagtgggcggggcgaggagatttaggagggtttaaaaggaggtggaaggatatacgggttatagtcggaattatttttcgaaggaggttacgtgtgtttttagttggggaattttttaaatttttattttttagtgatagtttcggaggtaagtcgttttttttttttgttcggggtgtttttgtttggtgtaggtagcggaattttaattttttttgcgtcgcggcggaaataggggttcggattagtttttcgaaggagcgttgtcggggttggcgtttggggaattggttatataagtatttatatttaaatacgtgttttcgttttttcgtttgttggttgtcgtcgatttttatagaacgcggggagagagtttttaaattggtgttatttttcgtttgttattttaagagtaagttaaaggattgagatttgagatttattttttgttttatatcgatttattttgcgtttttttaaacgtgggaaaaggagttgggcgttagggttttcgggtttttttatcgttgatgttttgtcgtttagggtgaatttttttggttttgtgtttgagggtattttttgttgtagtttagagcgtgtatttttcgatgttgtaataaacgtttagttattatttttgagttggtgagcgcgttttatttattgtggatttagttaagtgatttatttggtttgagaatttagttaatggtcgttagtttagaataaatttgttaagtttgtttatagtttcgattgggttgatttgttatcgtgagagagttgattcggaaatgttgagagttggatcgtatttttatttcgtattttattcgttaaggatttataaagtaagtagtcgattcgtttaaagagaatgagtattaatattagtttgggaatttattgtttttttattttttttaggaagtagaatta

SEQ ID NO: 197 - DNA, 5507 bp, Artificial Sequence
  chemically treated genomic DNA (Homo sapiens)
aaataagtgaaaattttagtttagtttaggttagttttagggttggttaaattagaggtttatttataatattgaggatttagatttttttgaaattttttttgtattaatattagtatttttattttttttgtaggttggtttgttttacgttataatggttgtagtaattagaagtgttatatttttagtaatatttaatattattattattatttaataatatttagaattgtgttatttttgttttaatttattaggtttttagtagattattttttattttttaaatgttaaaattgtattttgagtttttgtttaaattaatttggggtgaggtgaatggaagtagtattttaattgtatttattttttgtagttggatttgggtttgggttttattttttgatatttgtttataagaaagatttttgaagttaggtaggattggttgttgagtaggttagtgtttgttaaatttttatatatttttatatatgttataatatgtagataaaaagataattttttatataatttgttgggataaatttaggaggtttatagttatgatttgtttgaaggttttttttgttttagattttgtttagttgttttaggatgaggggatttatattatagtataattgtattttatttatagtataaattattttttttttttttagttgacgagtttagatgggtaataatagtgtttgttaaagagaaaaaaaaatgtatttaaattagataatttattggtataaatatcgagatatagaagtgataatagttttaagttaatgtttgatggtggtagttttagtaagtttttttttgatgtttttgtgtttttgtatatgttttttttttgttattgttttttttattaaatataatataatggataagtggaattaaatagaattgagtttaaattttttgttatttatcggttttggtattggataaattaatttttttgagtttgtttttttatttgtaacgtagattagttaatattatttattggaaagcgttgttttttagttaatgtatgtaaggtttaaaatttagatgacgggttgataggtgtagtaaatttttatggtatacgtatgtttatgtaataaatttatacgttttgtatttgtatttcggaatttaaagtaaaaaaaaaaaaaaaaaaagaaaagaaagaaagaaaaagaaaaaaaaggttgtttttggggattaaataagataattatgtaaggtggttagtatagtttttggtatatagtaaatgttaggtttgtttgatagatttttatttagtagttattgtttttttgaaaattttttttagacgtttttacggtgtttttcgtttttatattattataattttttattatattattattcgtttattttttatagttttttttttttttttttttaattagtgattttaaaaggttagtaagtgtttaatattttttattttttaagtgattggtaaagtttcgtatttattagcgttttaagtttgtttttgttttggtcgattttgtaaaacggattgggcgggatgagaggtggggggcgtcgtttaaggagggagagtggcgttttcgtcgagggtgtattagttagatattttttgcggggttcgagagttttttttattagatttcgggatagggatgaggtttatagttatttattagattttttgtatagtttcgttaagtgtatttcggtttggagggggtggttttgggtagaagtacgttcgggtcgcgtcggatgttttttggaaggcgtttggatttacgttaggttttttagtttaattttttatgatttagcgttttagttcgcgtatcgattagcgttttagttttttatagacgtcggcgggttcgggagtttcgcggacgtgacgtcgcgggcggaagtgacgttttttcgcggttggacgcggcgtttagttgtcgggcgggggagggcgcgttcggttttttttaggggacgttgaaattatttttgtaacgggagtcgggagaggacggggcgtgtttcgacgtgcgcgcgcgtcgtttttttcggcgtttttttatagttcgttggttttcgtcgcggaaaggcgttatgtcgtttaaaatttttcgaaaaacggtcgttatcgtcgtcgttgtcgtcgcggaattttcggtatcgtcgtcgtcgtttttttttgaggaggatttagagtaggatagcggttcggaggatttgtttttcgttaggtgagcgagtagagtcgtcgtcgttttacgcgggaagggcgtttcgggtgtgcgtagggcgggcgttaaggcggttcggcggggattcgttttcgttaggggtcgggtttcggcgggaggaggcgttttttttgtttttcgttacggcggagcgtttgtagaatggtgataggattttgggtttttgggcgaggggtttcggttttaatttgataggtgtcgggcgggtggggttagggttttgagcgaagtgataggtgtagtttttttttgtgaggttcggaggtagagggtcgttgcgagcgtttattagacgtaaaaaatgaaaaataaaaatataaaaatggtgtttgtgggagagttttttatcggagaattggagtatttcggtggtcgtttgattttttgttttggtttacgcgatgtaatagttgggaagtattttttttcgggcgtgtattgtatttgaagtttatttgtgggagaggtcgattagaaagttttggataagaagcgtagggttttgagtgtttattgtttataggatattcggtttaggagttttgcggcgtttttttagaataataatgtatcgaggttttggggatttaaagttatttgtagtgattgatggagcgtaattttttagaggaattgaaatatgggtaaaatttttatgagatatttattagaagtgtttgaaagtttttaaattttttttttttttgtttgatgaattttttttgcgtgttagtcggtttcggtttgttttattattttttttattttgttttttgattttgaattagtaaggattttggtgttttttttttttgtttttgtttttggtataaaattagtggttttgtgcgtaaatggaaattttcgtttttttttattaagtggaatttaaatttaagtaagtttatacgaatgtattagattttgaagggaagtatttattgtattataatattttattttttttgatttttttattttatggttaaatagttatgattgaaagagtgtaattgttattattgttagtattggttttattttgagataagtttattgtagagggaatgggatttgtttttgttttttattatttttttttttatttttgtttattattaaatttttttatttttatttatttttttttattcggtatatattaataatttacggtagaaaagattgaagtgggatttaggaaatggtttttggaaggttattaaaaatttatatatttaaatggattgttttataggttagttaaaaattatattcgttaaaaaattaaaataataataataaaaaattaaaaattacgtttggggtatgttttgggaaaagatatggttttagtttttgattaaattttgatgtatttaatttttgtaaattttttttgggaaaatgtagtaatggttattttaaagaattttatgttatgtatatagttttggaagtatattttaatgtagggtaattaggaatattgacgttgtggttattgtttggaaaaaagaggattgttttttttattttttaatttattttatatattttaagtaatggaattataaaaaatttttttataagttaaaattatataagatatagtttgtttttgattatttatatttataaagggttttattaatatagatagttgaattttataaattaattagtaagggtagaatcgttgtcgtgtagtttgatattgagtattttgtttggagatggaattaaggtttagtttaattgtatttttagtgatagattttatttttgatttgagagtttagattttatttttgttgttttatttttggtttaagtaatgtagttggaagggaaattgttattaggaatagtatattatatttattgttgaaataattaaaggttaattatgtttcgagttgggtgtgatggcgcgtatttgtagtttatgttatttaggaggttgaggtaggaggattatatgagtttgggagttggaggttagtttgggtaataaagtaagattttagtttttaaaaaaataaaaaagttgattaggtatgttggtttacgtttgtaatgttagtattttgggaggttaagatgggaagattgtttgaggttaggagtttgagaggagtttgggtaataaaataagattttgtttttaaaataaattttaaaaaattagttagtggttgtggtatatttgtaggtttatttatttaggaggttgaggtgggaggattttttgagtttaggagtttgagattgtagtgagttatgattttattattgtattttagtttggatgatagagtgaaattttattttaaaataagaaaaaaaaataaaaattaattatgttttgaaggaggaattggtagtttagaatagtggttaagggtatggattatagagttagattgttgggtttatatagtggtttattttttatcggttgagattttaggtaagttttttaatttttttaatttgatagatatttgtaaatgtttatttttatagatgagaatatttatttaaaagggttgatgtcgggatttagtgaaattatatgtttaaggtattttttataggattatagtaaatatttaaaaattattaattattttttatattatttttattagtagataatatatagaaattagatgaatgaaaatgaattagttaataagaatttattaaatgtttgtttttgttaaggggaaaggataaaaataagtagtcgtattatgtaagatgtgttagtaggtagagagatatatgaaatattgataagagaagattatagtttaataaagttattggcgttgaattgtataatattatttatgggtttttatttttttgttgttatttttattttatttttttaaatagttttagttattatatttatttttttttatagaagtgttttgttgttttgaagtatatttgatttattatgtaagtaaatattttttattgtgtggtatttttattttggaatgattatgaaaaagataattatatgtttaaatttgaagtgtaatgtttttttaagataaaataagattttaaagtatttaataatgtttttttttatagtagtgttatgtgtaaattattgaaataagtatgtattgaattaatttgatttataagtatatgttaattatatgattatttttatttggtagg

SEQ ID NO: 198 - DNA, 5507 bp, Artificial Sequence
  chemically treated genomic DNA (Homo sapiens)
tttattaaatgaaaataattatataattggtatatatttataaattaaattgatttagtatatatttgttttaatagtttgtatataatattattgtgaaaaagaatattattaaatattttaagattttattttattttagaaaaatattatattttaaatttaaatatatgattattttttttatggttattttaaaataaggatattatatagtgaaaaatatttgtttgtatggtaagttaaatatattttaaagtagtaaaatatttttgtgaaggaaagtaaatgtaatagttaaagttgtttgggaaaataggataaagataataataaaaagataaaaatttatagataatattatataatttaacgttagtgattttgttaaattgtagtttttttttattaatgttttatatatttttttatttattagtatattttatatgatgcgattgtttatttttgttttttttttttaataaagataagtatttaataaatttttgttggttaatttatttttatttatttaatttttatgtgttatttattaataagaatagtatgaagaataattaataatttttgagtatttattatgattttgtagaaagtattttaaatatatggttttattgaatttcgatattagtttttttagataagtatttttatttgtaaaagtagatatttatagatgtttgttaaattggagaagttaaagaatttatttgaggttttagtcggtaagaggtaaattattatgtgagtttaatagtttaattttataatttatgtttttgattattattttagattgttaattttttttttaaaatataattagtttttgttttttttttttgttttgaaatagggttttattttgttatttaggttggggtgtagtggtgaaattatggtttattgtagttttaaatttttgggtttaagggatttttttattttagttttttgagtagatgagtttataggtgtgttatagttattggttaattttttaaaatttgttttagagatagggttttgttttgttgtttaggttttttttaaatttttggttttaagtaatttttttattttggttttttaaagtgttggtattataggcgtgagttaatatgtttggttagtttttttgtttttttaaagattggggttttgttttgttgtttaggttggtttttaatttttaagtttatgtgatttttttgttttagttttttgagtagtatggattataggtacgcgttattatatttagttcgaaatatgattaatttttgattattttaataatgaatgtggtatgttgtttttagtgatagttttttttttagttatattatttaggttagagataaggtaatagaaataagatttaaatttttaaattaggaatggaatttgttattggaggtgtagttggattgagttttgattttatttttaggtaagatgtttagtattagattgtacggtagcggttttatttttgttggttaatttatagagtttaattgtttatgttaatgaaattttttgtgggtatggataattaagaatagattgtattttgtatggttttgatttataagagaattttttatagttttattatttaaaatatataaaatgagttaaaaaatgaaagaaatagtttttttttttttaagtagtggttataacgttaatatttttggttattttatattagagtatgtttttaaagttgtgtgtataatatggaattttttagagtagttattattgtatttttttaagggaaatttgtaagaattggatatattagaatttaattagaaattaaagttatgtttttttttagaatatgttttagacgtggtttttaattttttgttgttgttattttggttttttaacgaatatggtttttaattgatttataagatagtttatttaaatatataaatttttaatagttttttaggggttattttttaaattttattttaattttttttgtcgtgaattgttagtgtatatcgagtggaaagaaatgggtgagggtgaaaggatttggtgatagataagaatgggagagaaaatagtgaaaaatagaaataagttttattttttttgtaatgaatttgttttaaagtagaattagtgttgataataatgataattatatttttttaattatagttatttaattataaagtagaaaaattaagaaaagtaagatgttgtaatataataaatatttttttttaagatttagtgtattcgtatggatttgtttaaatttagattttatttaataagggaaaacgaaaatttttatttgcgtatagaattattaattttgtgttaaaaataaaggtaaaaagaggggatattaagatttttgttggtttaaagttaaaaggtaaaatggaagaaataatgagataagtcgaagtcgattaatacgtaagaagagtttattaaataggaaaaaaaaaagtttagaaatttttaagtatttttggtaaatgttttatgaaagttttgtttatgttttagtttttttaaagagttacgttttattaattattatagatggttttgagtttttaaggtttcgatgtattattgttttaaggaaacgtcgtaaagtttttgagtcgagtattttgtgggtaatggatatttaggattttgcgttttttgtttaaggttttttggtcggttttttttataaatggattttagatgtagtgtacgttcggaagaaaatattttttaattgttgtatcgcgtgaattaaaatagaaagttagacgattatcggagtattttaatttttcggtgaaaaatttttttatagatattatttttgtatttttattttttattttttgcgtttgatggacgttcgtaacgattttttgttttcgagttttataagagggaattgtatttgttatttcgtttaggattttagttttattcgttcgatatttgttaagttgaagtcgagatttttcgtttaagaatttagaattttgttattattttgtagacgtttcgtcgtggcggggggtagggagggcgttttttttcgtcgggattcggtttttggcgaggacggattttcgtcgagtcgttttggcgttcgttttacgtatattcggggcgtttttttcgcgtgaggcgacggcggttttgttcgtttatttgacgagaggtaggtttttcgggtcgttgttttgttttgggttttttttaggagggggcggcggcggcggtgtcgggggtttcgcggcggtagcggcggcggtggcggtcgtttttcggggggttttgggcggtatgacgttttttcgcggcgggagttagcgagttgtggaggagcgtcggggaggacgacgcgcgcgtacgtcggggtacgtttcgttttttttcgattttcgttataaaaataattttaacgttttttgagaaaaatcggacgcgttttttttcgttcggtaattgagcgtcgcgtttaatcgcgggaaaacgttattttcgttcgcggcgttacgttcgcgaggttttcgggttcgtcggcgtttgtggggaattggggcgttggtcggtgcgcgggttgggacgttaagttatgaggaattaaattgggaaatttggcgtgggtttaggcgttttttaggaggtattcggcgcggttcggacgtgtttttatttagaattattttttttaggtcggggtgtatttaacggggttatataaagagtttggtgggtgattgtgggttttatttttatttcggggtttgatagggaagattttcgggtttcgtagggaatatttggttagtgtattttcggcgggagcgttattttttttttttgggcggcgttttttattttttatttcgtttaattcgttttgtaaagtcggttaaaataaaaataaatttggagcgttgataggtgcggaattttattagttatttagaagatagaaaatgttagatatttgttggttttttgggattattggttagggaaaggaagggagggagttgtggggaatgaacggatagtagtgtaataaaggattgtagtggtgtaagaacgggaagtatcgtggaaacgtttgaggaagatttttaggggagtagtagttgttgaatagaagtttgttaggtaggtttgatatttattatgtattaggaattgtgttggttattttatataattgttttatttaatttttagaaatagtttttttttttttttttttttttttttttttttttttttttttttttttattttaagtttcgggatataagtgtagaacgtgtaggtttgttatataggtatacgtatgttatggaggtttgttgtatttattaattcgttatttaggttttaagttttgtatgtattagttaagaaataacgttttttaatgggtagtattagttagtttacgttgtagatgaggaaataggtttagaggagttaatttgtttaatattagggtcgatgggtagtagagaatttgaatttaattttatttgattttatttgtttattatattatgtttgatgaagaaaatagtgatagagaaggagtatgtgtaaaggtataaagatattagaaaagagtttgttgggattattattattaaatattggtttaaagttgttattatttttgtgtttcggtatttgtattaatagattatttagtttgaatatatttttttttttttttggtagatattgttattgtttatttgaattcgttaattgagaaggaaagagatggtttatgttgtgaataaaatatagttgtgttgtgatgtaaatttttttattttggagtagttgagtaaggtttaaggtaggaagaatttttaagtaggttatggttgtaagttttttgagtttattttagtaagttgtataagggattatttttttatttgtatattatgatatatgtgaggatgtgtaaaggtttggtaagtattggtttatttaatagttagttttatttaattttagaaattttttttgtgggtaaatgttaggagatagggtttaggtttaggtttagttataaagaatgaatataattaaagtgttatttttatttattttattttagattagtttaggtaagagtttaggatgtagttttgatatttgaaagataaggagtagtttgttgggagtttgataaattgaaatagggatggtatagttttaaatattattaaataatagtaataatattaagtattattgaggatgtgatatttttgattgttgtagttattgtaacgtgaggtaagttaatttatagagaaggtagaaatgttgatattggtgtaggaggaattttaaaagaatttggatttttagtgttataaatgagtttttgatttggttagttttggagttgatttaagttgagttgaggtttttatttgttt

SEQ ID NO: 199 - DNA, 6289 bp, Artificial Sequence
  chemically treated genomic DNA (Homo sapiens)
tttttgtttttgttttatagttattttgagatttattatttagttaattttaaaagtattgttgattattgtgaattttattaaggtttttttaagagggttttattgttttaaaattgtttttgaaatattttgttatttgtttatttgatttttttttatttttagagttttattttttgttttttcgtttgttattatattttttataagtttttatttttgttttagtatttttttttttgttagtttatatattttattaagtaaaataaaaatagtaaaatagtaatgttttttgaatttttaaattgtttaatttttagattgttttttaatttggaaaatgttttatattaagtttatttataaattaaggattggtaatttaaaaaattaaaataaagaaaggagaattggaaataaaatgaattggttgggtacggtggtttacgtttgtaattttagaattttgggaggtcgaggtgggtggattatttgaggttaggagttcgagattagtttggttaatatggtgaaattttgtttgtattgaaaatataaaaattagttgggtgcggtggcgtatatttgtaattttagatatttaggaggttgaggtaggagaatcgtttgaatttaggaggcggaggttgtagtgagtcgagatcgtgttattatattttagtttgggtaatagagttagattttgttttaaaaaaaaaaaaaaagtttaatttacgtagagttagttgaacggtagataggagtttggttatttaaattagtttattagaaaattcggagattggggtttttaaagaatgatttggcgggtagggggttagggattggcgaatgttaatttgttaggtgggaggtgaaattatagggggttgaagtgggtttttgttgttttttgttattgagtggaattgtagaatttgttgagttagattatggtttgagtggcgttagttagtgtatcggaatgcgcggtttgaaaagtatttttagtattaattttaggttttataatagtgatgttatttttgagagtaattggggaggttaggaattttatagtttttggttgtaagttttttaaattataatttttaattttgtggttaatttgttagttttataaaggtagattgatttttaggtaagaatggggtttgtttttggaaaggattgttataatttttgttttaaagtgaaattagaaattaaattttttttgtagttagttaggttttcgtttaggaatgaataagggtagttcggaagtgagaagcgtggagttatttaggttagattttttgtattgttataatttttttattgttaggatttttgtaaaggtagtttcgtgaacgtatagagataggtttttgttattatttttattttttagataaggatatttaggcgatgaggaagttttatttttgggaatagtttggatacgaaatttttatacgttagtgttttttggatattttttcgttagtatagttttgttgaatgtttttacggtggggaggtacgtgtttaaaatgcggggaaggtgtttttattttatttttggtgaaattaggggagttaatttttttaaatatgatttttggtttttttgaatcgtcggtttggattacgttttttagtagttcgtgtttaagattacgggtgtttgtaggcggttagcgtcgtttgcggcggcgtaggcgcggtgcgggcggcggacgggcgggcgtttcgtcgtttgaatggttgcgggttcgggtttttattttatttgaggttcggtcgtttaggggtgcgttatgtcgtcgggaggtgattagtcgttatcgttttcgttttttttttcggcggcggtagtttcggatgaggaggaggaggacgacggcgaggcggaagacgtcgcgtcgtttgtcgagtcgtttattttttagatttagtagcggttcgacgagttgtgtagtcgttttaatatggacgaggcggcgcgggtcgaggtttgggatagttatcgtagtatgagcgaaagttatacgttggaggtgcgttcgcgggcggaggggcgttttcggtttagttggcgtgaatcggtgtttttcgagtcgcgtcgcgcgtttcgagagattttcgggcgggttgcgggtttttagtttcgagaggggtggggattttttttgcgttatttcgaggtttttagtcgtttcgagggttaattcgttttcgtcgcgtttttttgcggttttcgaatggggaacgcgttttgttttaaagtagtatagtaaggttgagatcgcgttggggtttcgttgaggaaaatgggtgtgtgtggtttatttgatttttcgttcgttttgttagtagaatgaattagtgtcgttgttaagattatacggataaggggaggggatttgtttttatttgtatcgcgattaatcgggttgtggtatttgggtttttaggcgttttcgtttgttcgtttttttttgttaattaaattgtttttgttttggcgttgcgggcgtttgagttaacgtgttgatgcgttttgggttgtgtttacgtttgtgtaaataaattaatatttatttttttttaggttagatgaaatgagtttttcgtcgattcggatgtagatatatgtttttatttgttattaggattaggattgtggttatttcgagggttttttggttatttcgggtattgtataggatttttgttgttgttgcgattcgggtgtgttaggtcgtagttttcggatagggtttgtagatgagaaaaatggttattttagttagtgagtgttagttttgtatgtattttttttttatgggttaatgggaagtgatacggaagtacggattgtttattagttgtttgattgtgtgtgtggtatttaaatttgaggttatttgattttttaagtcgttttataattaatttgtagaaagagtcgggtaaataggtttaggatgtaaagtttaattaaggtattatttaaatatgatgtttttggttatgtgtattgatgagtgaggttatttttaatttgtatttgtattaatagaattttaatttaattattagttttttttttgaattgttaggtttgtagaagatagtgtatggtggttttagaattcgatagatttgaaatcgttggaaaagtttagtatggtgatttttaaattggagatatttgtgtttattttatagagttgttttgaagattaaataaggtaataatgtagtttttggtatataaagtatttatatggatagtgtttttaagtttattaagttttttgtatatttatatgatttggttgagtaagttatgtttttatttattttttagtgtttttttgtagtttggtaaagagaaggattggttggttttttatgttgttttttgttttttgggtttttttttggtaaatggttttaaaggtttttaaataagtttttattttatttttaagataattttgtaaattagatagaataagtattatcgttatttatttgaggtattttaatttatagtagttaagttgtatgaagtttagtgatatatgagtaagtattacgtaatagttggttagtaaattatttttgaaaatatgtttgattatttaatttttttgattattgagattttagttttagttttttagtttagtttatttagtaaatgatttatttagtaaaatatttattaaatattttttgagtatttattatttgttatatattgttttaggtgttggatatagagtagtaaatttgtttttgtggggtttatagtgaggtacgttgtgataatatgggatgttatttttatgggagtgtaagggaaaataaagtttttatgatgtttaatatagaatattggttatggaattttaatttgattttttgtattttttgtgtatttttaatttgtaatttatttttatagtttttagttaagaaaatgtagtttttgagattgttaagtaatttttttattgtgttatagttattgtatggtagagtcggaatttgaaattagatttatttgattttagaagatgtgattatgagatgttaattttgaggataatttttttagtattatggaatttttaatatatattttttaggattaaagataaattaggtatagagtttattttttgtataaattatttaaaagagtttcgcgttttattttgttatttaagtattgtaaaatttttataagattaatttttttttttaggaacgatatagttgtaaattttttattttttttttttttttttttttttttttattatttaagtagttgtgaattttttagagttaaaatagaatattatagattattttttaaattttttattgaagtagaggataatgttgtgatcgatttaattttatgttttttaagagatattgatatagtagagaaatgtagtagttatgtatttaaatttgtttttatattataaattaagaatattatgaaattattttttagagatatatgtgatatatagattttggttgttttttttttttttataaaagaatatttatgttattgatatatataagtgggtttgtaagatagtttatgtgtaaatgtgaaaaaaggaagaatttttagttttttttatttttatttagattagtaatgaatatattgaagttaaaggatattttttattttttttcgtttttatagggagaggaaagttgtattattttttgagtaaaaagaattgtgacgattttttataaataatgttttaaaaattattatttttgaatgatatttggtagtggatttataatagttttatttggttatataaataaattttatgtatttatgtatgtgttttgattaggtataaaattagtggttgaatatttatttaagtttaattttgtatttttattatttttttagattttgagtaagattaaaaatataaataataggttaggcgtaggggtttacgtttgtaattttagtattttgggaggtttaggtgggcgagttacgaggttaggagattaagattattttggttaatatattgaaatttagtttttattaaaaatataaaaaattagttgagcgtggtggtgggtatttgtagttttagttatttaggaggttgaggtaggagaatggtgtgaatttgggaggtagagtttggagtgagttaagatggagttattgtattttagtttgggtgatatagtgagattttattttaaaaaaaataaaaaataaataaaaataaataataatattgtttgtattattatggttatatagtaaattgttttaaaatttaggggtagaaagtaatttgttttggttataggttttgtgagtaaggaatttaggttggggatagtgtggatgttatgtttttgcgttaaaatgattggtattttatttggaagatttgagtaattaggtattggtatagttggagttcgttgggtatttttgtatgtttgttttatgtggttttattagtatggtgatttagggtagttaaatttttatatgttggtttaggatttcgaaggtatatgttttaagagagagaattaagtggaatttatattgttttgtataattttttagaattatatagttttatttttatttttgtaattattgatagagatagttaattagtgtgagggaacgtagatttttgtttaggtttaaggtgagggaattttttttattttttagtggaataatgttaatgttatattataagaagagtttacggggttgggtatagtggtttatatttgtaattttagtattttggaaggttaaggcggatggattatttgaggttaggagtttaagattagtttgggtaatatgataaaattttgtttttataaaaaatataaaaattagttaggtatggtggcgtatttttgtagttttagttatttgggaggttaaggtaggaggagtgtttgaatttgggaggtggaggttgtagtgagttaagattgcgttattgtattttagtttgggtgatagagtaagattttattttaaaaaaaaaaaaaaaaaaaaaaaaaaaaagagcgtatgagatagggttattattgaaattaagttttttataaaaatataaataatatttttaatttaaatatatttttaaaaatattgaaatatttatatgtagttttttaattaaaaattaattttttttttttttatagg

SEQ ID NO: 200 - DNA, 6289 bp, Artificial Sequence
  chemically treated genomic DNA (Homo sapiens)
tttgtaaaagaaaagaaaattgatttttagttaaaaagttatatataaatattttaatatttttaaaagtatgtttaaattgaaagtgttgtttatatttttgtgggaaatttagttttaatgatgattttattttatacgttttttttttttttttttttttttttttttttgagatggaattttgttttgttatttaggttggagtgtagtggcgtaattttggtttattgtaatttttattttttaggtttaagtattttttttattttagttttttaagtagttgggattatagaagtgcgttattatatttggttaatttttgtattttttgtagagatagggttttgttatgttgtttaggttggttttgaatttttggttttaagtgatttattcgttttggttttttaaagtgttgggattataggtgtgagttattgtatttagtttcgtaggttttttttataatgtgatattaatattattttattgagaggtagagagggtttttttattttggatttgggtaagggtttgcgtttttttatattgattaattgtttttattaataattgtagaggtagaagtgaaattatgtaattttaaaagattatataaggtagtatagattttatttggtttttttttttaggatatgtgttttcggagttttgaattaatatgtaagaatttagttattttggattattatgttggtgagattatatggaataaatatatagagatgtttaacgagttttagttgtgttagtatttagttgtttaagttttttaggtgaggtattagttattttgacgtagaaatatgatatttatattgtttttagtttgaattttttatttatagaatttgtgattaaaataaattgttttttgtttttaagttttaaggtaatttgttatatagttatagtaatgtaaataatattattgtttatttttatttattttttattttttttgagatggagttttattgtgttatttaggttggagtatagtggttttattttggtttattttaagttttgttttttaggtttatattatttttttgttttagttttttgagtagttgggattataggtgtttattattacgtttagttaattttttgtatttttagtagagattgggttttaatgtgttagttaggatggttttgattttttgatttcgtgattcgtttatttagattttttaaagtgttgggattataggcgtgagtttttgcgtttggtttattgtttatatttttaattttgtttaaaatttagaaaagtgatagaaatataaaattaagtttgaatggatatttagttattaattttatatttaattaaaatatatatatgaatatataaaatttatttgtataattaaatgagattattgtggatttattattagatattatttaaaaataataatttttaaggtattgtttgtaaaagatcgttataattttttttatttaagaagtgatataatttttttttttttataaaagcgaggaaggatggaagatgttttttagttttaatgtatttattattggtttaaatgaaaatgagaagaattggaaattttttttttttttatatttatatatagattgttttataaatttatttatatgtattaatagtatagatgtttttttgtaaaaaaaaaaaaaatagttaagatttgtgtattatatatatttttgggagatggttttataatatttttgatttatgatgtaaaagtaaatttagatgtataattattgtatttttttattatattaatattttttagaaagtataaagttaagtcggttatagtattattttttgttttaataaagggtttaaaagataatttataatgttttattttggttttagaaaatttataattatttggatggtggagggagaaaaaaaaaaagaaaaaaaatagaaagtttataattatatcgtttttaaaaagaagaattagttttgtgagaattttatagtgtttagatgataaaatggagcgcgaagtttttttaaataatttatgtaaagagtagattttgtgtttagtttatttttggttttaaaaaatatatgttgaaaattttataatattaaaaaagttatttttaaaattaatattttatggttatattttttagggttaaatagatttggttttaaatttcggttttgttatatagtagttataatatagtggggaaattatttaatagttttagaggttgtatttttttggttgaggattgtgagaatgagttataggttaaaaatgtatagaaaatataagaaattaagttaaaattttataattagtattttgtattaaatattataagagttttatttttttttgtatttttatgagaatgatattttatattgttatagcgtattttattgtaagttttataagagtaggtttgttgttttatatttagtatttagaataatgtgtagtaagtaataggtgtttaagaaatatttgatgaatattttattgagtaaattatttattgaataaattgggttaagaagttgaaattaaagttttagtaattaaaagaattgagtaattaaatatgtttttaaaaataatttattaattagttattacgtgatatttgtttatgtattattagattttatataatttaattgttatgagttgaaatattttaaataaatggcgataatgtttgttttatttgatttataggattattttgagggtaaaataagagtttgtttggaagtttttaaggttatttattaaaaaaaaatttaaaaaataaaaaataatataaaaagttaattagtttttttttttgttagattatagaaaggtattgagagatgaataggaatatagtttatttagttagattatgtaaatatataaagagtttagtaaatttgaaaatattgtttatatgggtgttttatgtgttagaaattatattattgttttatttaatttttagaatagttttgtgaggtaaatataaatatttttagtttagagattattatattgaatttttttagcggttttaggtttgtcgggttttaaagttattatatattattttttgtagatttaataatttaaagagggaattagtaattgaattaaaattttattaatgtaaatataaattaaaaataattttatttattagtatatatagttaaaaatattatatttaaataatattttggttaggttttgtattttggatttatttgttcgattttttttataaattaattataaaacgatttgagaaattaaatggttttaggtttaaatgttatatatatagttaaatagttgataaataattcgtattttcgtgttattttttattggtttatgaaggggaggtgtatataaagttgatatttattggttagaatggttattttttttatttgtaagttttgttcgaaggttgcgatttaatatattcggatcgtaataataataggagttttgtgtaatgttcggggtgattaaaaagttttcgaggtagttatagttttgattttagtgataaatgggggtatgtgtttatattcgggtcggcggagggtttattttatttggtttggggggaaatgagtattaatttgtttatatagacgtaaatatagtttaaaacgtattagtacgttgatttaaacgttcgtaacgttagggtaaaggtaatttggttaatagggggaagcgaatagacggagacgtttggagatttaggtgttataattcggttaatcgcggtgtaaataagggtaagttttttttttttgttcgtgtggttttgataacgatattagtttattttattaataaggcgggcggggggttagatgggttatatatatttattttttttaacgggattttagcgcgattttagttttgttgtgttattttagggtaagacgcgttttttattcggaagtcgtaggaaagcgcggcgagagcgggttagttttcggagcggttaagagtttcggaatagcgtagaggaagtttttatttttttcggggttgggagttcgtaattcgttcgagagtttttcgaggcgcgcgacgcggttcggaaggtatcggtttacgttaattaggtcggaagcgttttttcgttcgcgagcgtatttttagcgtgtagttttcgtttatgttgcggtagttgttttaggtttcggttcgcgtcgtttcgtttatgttgaggcggttgtatagttcgtcgaatcgttgttggatttgaggggtgggcgattcggtaggcggcgcggcgtttttcgtttcgtcgtcgttttttttttttttattcgaggttgtcgtcgtcggagggggaggcgggggcggtggcgattggttatttttcgacggtatagcgtatttttgggcggtcggattttaggtgaggtgagggttcgggttcgtagttatttaaacggcgaagcgttcgttcgttcgtcgttcgtatcgcgtttgcgtcgtcgtaaacgacgttgatcgtttgtaggtattcgtagttttgagtacgggttgttgggaaacgtagtttaggtcggcggtttaagggggttaaaaattatgtttaaaaaaattagtttttttagttttattaggggtgaaataaaagtatttttttcgtattttaaatacgtatttttttatcgtgagaatatttaatagggttgtattgacgagaaaatgtttaaaagatattgacgtgtgaaggtttcgtatttaggttgtttttagaagtaaaatttttttatcgtttggatatttttatttaaaaaatagggataatagtaagggtttgtttttgtacgtttacgaaattgtttttgtaaaaattttaatagtgagaaagttatgatagtgtaagggatttgatttaaatgattttacgttttttattttcgagttgtttttgtttatttttgggcgaagatttaattaattataggaggaatttaatttttaattttattttgaaataaagattgtaatagttttttttaaaaataaattttatttttgtttggggattagtttgtttttgtagaattaataaattagttataagattagaaattatgatttaggaggtttgtagttagaggttataagatttttgatttttttaattgtttttagggataatattattattgtaaaatttaagattggtgttggagatattttttagatcgcgtatttcgatgtattagttggcgttatttagattataatttggtttaataagttttgtaattttatttagtaatagaagatagtaagagtttattttaattttttgtgattttattttttatttgataaattagtattcgttaatttttggttttttattcgttaagttattttttaaaaattttagttttcgaattttttggtaggttgatttgaataattaaatttttgtttgtcgtttagttggttttgcgtgaattaaattttttttttttttttgagatagagtttggttttgttgtttaggttggagtgtagtggtacgatttcggtttattgtaattttcgttttttgggtttaagcgatttttttgttttagttttttgagtatttgggattataggtgtgcgttatcgtatttagttaatttttgtatttttagtataggtagggttttattatgttggttaggttggtttcgaatttttgattttaagtgatttatttatttcggttttttaaagttttgggattataggcgtgagttatcgtgtttagttaatttattttatttttaatttttttttttttattttaattttttaaattgttaatttttgatttataaatgggtttgatataaaatattttttagattgaggagtaatttgaggattgagtaatttgaggatttagaaggtattattgttttgttatttttgttttgtttggtgggatatgtaaattgatagagggaaaagtgttgggataaaagtaggggtttatggaaggtataatgataggcgggaggataggaaatggaattttgaagataggagaaaattaggtagataggtaataggatattttaggaataattttgagataatggaatttttttaagaaaattttagtaaaatttatagtaattagtaatgtttttggagttggttaagtgatgagttttaaggtgattatggggtaagaatagaag

SEQ ID NO: 201 - DNA, 14491 bp, Artificial Sequence
  chemically treated genomic DNA (Homo sapiens)
tattgtttatttttaaatttgtggaaatttcgtggttagtatttgaagtttgttttattgttaaggttttttgttataagagatttttattttttgataataattaagaggtggaaaaagggaagttattattaattttttattttataaagtatatgaatttataatatgttaatagtggttaaaatgttttatttttaaggttatgttatatttttagaaagatttatatataagttagggagagatagggttaggttttttttgtatttcgattatcgtagaatgtttatttttatattttgtaataattttaatagtacgtgtgtttggggatttagagaattttatagtttttatatagtatttttttttatttttttttttaatttgtttttattaatgtattgttaggaggatgaagggtaaggaggatatataatttttttttataaagggtggaagtttattttaagaatggaaataaatttgtagattagtttttagagagattaaatttttgaaaaagtttaaaatttggtagatgaagtttttagaatagacgttagttattttgagattagcgttagagtggttttagagtggttgaggtttatcgtttatttttgtttagtttattgttaagaatggtttttgtatttttattttttatttttttgagacggagttttgttttgttgtttaggttggagtgtagtggggagattttagtttattgtaattttcgtttttcgggtttaaacgatttttttgttttagtttttagagtagttgggattataggcgtaggtaattatgtttggataatttttgtattttgtagagacggggttttagtatgttggttaggttggttttaaatttttgagtttaagtgattcgtcgttttagttttttaaagtgttgggattataggtatgatttattgtattcggtttgtatttttattataaaatgttatttatttatttatttatttatttatttatttatttatttatttttgagatagggttttattcggttatttaggttggagtgtagtgagcgattatggtttattgtaatttttatttttttggtttaagtagtttttttattttagtttttagagtagttgggttataggggtgtattataatgtttggttaatttttttaaaaattttttgtagagatgggggttttattatggttgtttaggttggtttttaatttttgggtttaagggatttttttatttttcggttttttaaagtgttgggattataggcgtgagttatagagtttagtcgatttttgtatgtttaaatggttgggaataaagttaaaagaataataatatttcgtgatatatgaaaattatattaaatttaaatgtcggtgtttataaataatgttttattaggatttagttgtttttatttttttagtatttatggttgtttttgagttacgacgttcgagtttgaatagttgttatagggatcgtatggttcgtaaaatttaaaatatttagttttttatagaatagtttgttgttttttgttttaatacggtttatattttatttgggaagttttgtgtttttagaggggagtatattcggtatgaaggttggtttaaatttaatattttagggaagtttttttcgtttttgggttttagtttttttaattataaaatggggttagtcgtagtgatttttggggatttgtttggtagtgggttaaataaataaagggagttggatttttcggagggtaggattaggggttgagtaggagtcggcgggttcgggtagggcgggttttttggggtttttaatttcgcgggcgggcgtagtgtttcgtaggtttcgtttttattggggaatttcgggcggggtgcgggcggcggggcgggggcgggtcggggcggggtcggtaggtcgtttataagatgggtggcgcgttcgttcggggttattcgtcgtagtttgcgcgttttttttagttcgcggtgttatggttttcgttcgtttgttcgcgttgttgttgtttttcgtaggcggagtcgtcgagtcggtgggtgtttggaggttttcgggttgggggcgaagcgggggcgtaggtcggtgttttttttgttcgtcggagcgtgggatgggggggggtagatcgggggtacgttatttttaatcggatatcgaggttcgggaaattttgttggaaattttgtttcggggttacgggttagttttcgggatggttttacgcgtcgtgcgtttttcgtttgttgtttttttcgttttttcgggttttagtttcgtcgcgggttacgggttcgttagtgattaagtcggtgttaattttttaatttttatattttcgttttttttttggtgattttggggtaggtttggagcgttgaatttttttttcgttttcggggcgtttagagtagatagttttaggattcgagatggttttgggggtcggggggttgcgtgtattcggaagggggagggttttagggttgtgcgaggtttttttttatatattaaggagaattgagttttaattttagttttggttttagttttgttattgatttgtgatttagggtaaagttttgtttttttgaatttttttttaatattgtattaagggtttgagggaatggggtaagaggggatattgcgttagggtttttagaaagttggggattttgtttttttcgaggatagaggagaggaatggtttagatttaatatttagttaggagttgagtttttgttttttgtaagaagtgtgtttatttttttttaattgtagataagaaaattgaagtatttattttgagtgaggtgaagggggtaggggggagagaaggttttaattagtttagggaaattttttttttttattgtttattggttttcgttatagttgtttttgggttagtagaagttttatttatgttcgtagtcggtttaggaggaggggggtaattttatttgggaagttggggggtatgggaattattggtgaaggtaatttgttttttatagtttgagttttgtgttttttttgtgttttttagttttagtttttagagcgagtgagtttttgtagtttaattattaatgttaatttttttgaaagttttggggtttttgtttttttgaatttatttagcggaaggttgattttgtttgtaggttttttttgaggaatgaatgagattttaggtaatatttttagtataattttaggtatgttatgatgattgtaaacgtggagcgtttttgtcggggggttagatattgttttaataattttttaatgggtatatttaggagtttaattttaataataattttattgtgtattgtttttaaattggttttgaggttagagaggttaagtaatttgtttagggttatatagttaatatataataaatgggtgagttagattgaaatttaggtagttaggtttttaagtttttgttttagtttaatttttattttttgtgttattttaggtgttttatcgttggtaattaaagacgggtttagaataggttgagattttaggttggaaggtaaaggaattttgaggtggaaggaaataaggttagagtgaggtgatgatttaatttaaattaaaggttattttgtttaaaatgttagtggttgaggatttaagttttttgtttttagtatagtgttttaaattaggttttgaaggatgtgtcgggttaagtaattggggaagtattcgaagggatattatttaggtagtatagggaaaaagaggaaaggatttaggaggttgttgaggttatcgtgtgtttagttatatgttagtttttttttaggggttgttgagtttttaggtgttttagggtgttgagtagttagttgtgttttgggggtattttgaaggatgtagtttgggggaaggggattgtgttagttttgtttgggtgatttattagttgtaggagatattagttttgggtagttgttttttgagataggtgttaagttttattttgattttagtttttttttttttggttaatgttatagattttttgtttgtaattggggtatagggttttttttttggtttgtttttttttttttttttagattgtggttggaaaaattagatatagttacggttggttcggattgaagagatgatttagcgtgtttttttttttttgtaggtagagaaaagtgaggtttagggagaaggattttgttaatagtagttaggagtgatagagtattttttatatgatagatttggtgtattttgtttttataaaaagatttgttatatggggattttattatgtttattttttaaatgtgagaggtaaaatggtattattttgggttagtagagggtatttaggattttaggatttttgattagtagtttttttattgtgggtggtgttttttcgattgttttattattttttttattatttttatattttggaagggaatttaggtttagtatttagttgtttttttttttgtttggttgggtttgttatattaaattagttttttttgtttagttgggagtattttttgatttgtttttttgttatttttttttaggttaattaaaggtagttttgttttgggagttttttttatttaaaggtgtttttatttaggggtatagtttattgatttggtttcgggtttaggcggttgtggggaagtgttttttatttattatttattaagtgtattttagtttaaggatatttttggttttttatagcgttttttttttgattatatgggagtaggggtgggggcggaagtttaggggtttttaggatttttgagtgaatagtgagagtttttgggattttttgagtttagggagttattaaatatttacgaaaatatttgggttatgatttggagggttttatgaggttggggggaggttttttttttcgttgggttgatattttttattttaaaatgaaaggtttgaatagggtagtttttagagttttttttattttttaatttgattaataatttaagtatttattatttaaaagaggttttttttttgaaggaattaatttgagggaattaatatattttattaaatgttgaattttttttttttttttttcgtatattgagggtaggaattttgttttatttgtttttgtgaaatatttgttttttagtttgtatttaggaaatgtttgtatgaatgaataaattcgtgtatgtaattttattttaaatggtttattattgttatttattgttagtatgagtattttttagtattgcgaggtattattttttttatttttataggaaattgatgttcggaataatgtagtggttttttaaggttagaattaggtttttttgatagggtaaggtgtttggtttgagtgtttttagaatattttagatgaggaaatttgttgggtttgaaggtagatattttaggttttatttttgcgttgttgggtgattttgagtaaatatgttttgtttttgggttttagtgtttttaattttaaaataaggaggttggattattgttttttaagggttttttttgtttagagagtttattgatgaggggaggggttttttgttggtttttttggtgaagagtttaaataaattttagttttagaagagaagttggggtggcggggggatatttagtttttgttatttttagtttttagaaatagagggtttttttaaggatttggagtgttgagtttgtttgaatgaggagttggggaagttaggttgggtttttagttttatttttttgttgggagaagttggtttttagttgttttttaatttttcggattggataggcgagtgtgatttttaaatgaatgtttaaaattggggtaaggggttggatcgagcgttgtgagttattgtatgttagcgtagtttgtttgagttatttatttttttttaaatttttggttaataggatagttttgtggtgggggtgttggaatgagtttagagttttattttgttttttgggagttattgttttagtgttcggggttcgaggggatatataggatatgtttgtattaggtttcgtatttttatagttttttgtttgtatgtagattttgatattgtatattgtgtagttagtttttaaaattgggttttagatttttgtagagtaggtagtattttttttttttttaaggtaaaattgaggttgtaattggtttgtatttttttagagagtaaaagttggtattgtttaggtttggtgtgattttaggattttttgatgtttgtgaggatttttttttgttttttggggttggttagagggtattgaaatattggtttggtgttatatagatttaattttagacgtgcgaagtttattttttattggttatatgaatttagttatgttattttatttttgagttttagttttttggtttgttaagaagattatgatatcggtgtggcgaagtttaaaggagacgatagggttgtaaataaaggtatttagtattatgtttggtagggaggaggtgttatttagtgatagtttttttttttgtttaggttatttttatgttagggggttttatttttgaagattttgagtttaggttttttggaaagttttttttattttttttattttttttatttatttttatagttgggaggtgggaagggagaaatttagggtggggtttttggagtttaaattttttatttgtttattttagaagtgggttgtttgttaattatcgaatgggtttatgtttaaataagaattagttttgggtagttttattttttttgttgggatttgttggagttttatgttgaatagtttgtagtttggagggagagggggtagggggtttgttaagggtattagattattttggatattgtttaggatttggggttatttttttgtgttggaggggtagagtttttatttttaaggaggttgagtgattgtaaatagtattttgaggggtggggtgttggtggatagaaaaggtatagtgttttgaaaagttagtttttcgtatgtttttattgtatggtgttttagagagggaggagagagaatatatatgttaatagttggggttttatttaattttagaagaataagtttgattttttgggtttgtttgttattaattaatatagtggtgattttgggtatatttttgtattttattggggtttttttggttttatttgttgaaggttgggtgattgaaaaagagggtatagaaaattttagttttcgttttagttttgttgtttatttagggatatatatagttaatacgttattttgttgatgtgaattttagtgttttttataaaatatttgtggtatttaaaggttattatcgttgtttggtaaatttgtaaagttttggttttattagtatttagacgagggtttttaattcggttagagtttggttttggggaggtggtgtttgtgtatatgttgaaaatgtaaattaagagttatagttattggggtttagatttttttattttttttagggggttgtagtattttttaaaaggttattttgattttagtagttttttttggttttgatttttttatagttatttttttttttttttttattttttagttttgtttttgttttttgttttttttaatttttatttttagtttagatttttttatttagcggtttttatttttttaggttgtattttatttttttttttgttttttaggttcgggagttcggttgttttagttttttttggtatagtagaagaggttgttggttaggtgatatttggggtaatggaaaggggaggtagggagaggttggtatgtgtggaaatagtgatttggtgaagtttagtagttagtggttaggtttgcggggattggcggtgttattttagtttttgggcgtgggggtagatgtggtatatggttggttcggttatttagagtggggatattttttgttttggagaagttttgtcggagtcgtttgtgggatagattgatttggtttggaggatggtttttttgggggtcggtgagggaggttgggaagaggtaggaagttagtatttagggttgatttaattagttgagataaggttgtagcgtgggttttttattttgttttgagaatataggaggtttgtttatatttcgagagtttttttagttttcggatttagtagggatttcggatttgttgtttagattataagttttaattttaatgtatttttgtttttgaggttttgagggagttagtttttttttggttgtttttatcggtaatcggagtaatgtttagtttggttattgggttgggatagagggaggtttgtttttttgagatttgttttttatagattggaaaattgaggtttagagaagggaattgtttacgattatttagggagttagtaataagggtgttgggttagtttttggtagggagatatttagaggtttttgaattttttttttatttttagttggtattttaggattttggagtttttgttgtgggaatgggttgttttgaggtttggtgaaaagttggttgtaggtagtgttaggtttggtttttttttgagtgattgtgtttagagtaattcgattttgaaggcgatatttgaatttttattttatttttatttttagatttggtttaattatttaggtattagagtattagattatggattggtgtgtagtttttttttattttttagatttttatttatttattttgtttttggggatttaggtttttaagtagaattttaggtgtttttggttattgttatttgtattttcggggaaaataaaaatggtttttatttttgtttgtttaggataggtggttaaagttgtgtgattttgggtaggtttttgattatttttgtattttttttttatagtttgaagggatttgattggttgttgaaaagtttttgggtttagaagtaaaatgataatttattatagattatatttttttatagtttgtaaagtattatttttttgtttttaggttagtttttttttagtaatagaattgtttttgtaagtttttttaggtttttgattttttgagtattgattttattggttaggaggaaggtaggtaggggttaattatagttattatttattgattacgtgttgggttttttgtatatataaatgtattttttttaatttttattattttgtaaggtgttattagttttagttataaaagaggaaattgaggattttagagatgaaataaatttttaagtttatatagttaggaagtggtagaatttatatttgtgaatttgttttgatgtataattattttgggtggtagagttatagttgtgggttttaggttttagttattttggggaatgtttggtttttaagaagtgggtggggtggggaagaatagttacgagtagtgtacgttgttgggggttttttgttagaaattattttggtgggtttaggtgttggagttttaggtatttattattttttttttttattaaatttggtttgtttagttattatttttttggttttgttttttgaaagaagggttaagtgtgttttcgattttattttttttggggaggagttaggtcgggagaggtttttattagtttatagttatttaagttttgattttgaatttttttttggtgttttagttaagtttttgtttttttgtttaagtgatattatttttatttttgtttatttttaggtagggatagggttgttttggagttttggtttagttagtgtgttgtggattggcgggttaggttggagagaagtgaagagtgggtggtagtgagaagtttagttgtggttgggacgtgtttttgaggaagatttggatttgaattttagttttagttttttagttgtatgacgttggataagtgatttagttgaattttagtttttttatttgtaaaatgggtagagtattttgtaaggttgttttgttatttaaatgaatttgtataaataaagtatttagtatggtgtttggtatgtagtggatattttttttagttatttatgttttttttggggtgatagaagttataggatttggggatagggttgggataggattttttcgtagttttatgtttatagttaaaagattagatggggagtataattgtaatgatagttgttgtttgtggatttgttgagatttttaggggtagttaatattttggaaggggagagaagataattttagtttgggagttaggatatttaggttttaagtttattttcgttgttagttgtttggatgattttggtaaaattttttgttttgtttgtttgttaggttataaaattagatattttttgttggtaggtgttagtttttgtagaataaaagagtatttttttttttttttttttttttaatagtttggggaagaatgtagtatttttaaatttttaggtattaattttagatttttattagttatagggttagtagagtttgtgggatttaggtttattgttttattttttattttttggagatagggtttttttttgttatttaggttggagtgtagtggtacgatcgtagtttattgtaatttcgattttttgggtttaagtgatttttttattttagtttttcgagtagttgggattataggcgtgtataattatatttggttaatttttgtagagatggggttttattatgttgtttaggttgattttaaatttttgggtttaagtgagttttttattttggttttttaaaatgttgggattaagttattgtgtttagttattattgttttatttagttggtaatttttgttgtgtgtttatgaaagggataaagatataaggagatttgagagtttagagagggtgtttgtgtatgtatatatacgaatatatatgtttgggtaaaggtggggtgagttgaggagaatagattatatttttagttaggagtagggcggggtttatttttggttagggttgggtttggttgttgggtggtttggttttttaaagttattttagatttaatgggttttatttgaaaagagggcggaggagaggaggatcgttggtgtttttttaatttttatataaaaaagagtgattgtttataattttacggggtttggtttcgttttgttggtttagttttaaatggtttttatttattttggagttgtttttttttttgttagaggttatgggtggagaagggattaaaatagggtagagagggggtttttagagtttaaggagagatttaattttttgtgtttttttattattattgggagttggaagaagtttttttttagttttttgatttgttgtaggagggaaattttgggtttatttaaatgtagtttttgaagattttatttttttagagttttgaaataggatcgaatttaggtcgtgtcgcggagtttcggggtgattttagattagattagttttttttttggaaattgagtataaaaatgaagggttaaggatgaataggtgtttataaagagggttgaattgggaataaattttggttttagttttggttttgttgttgatttggttgtaagatttttacgttttattttcgtttatagtttttatttttttaatgtaaaacggaggtaatttttaatagttagtgggtatgttaattttatgggttgttttgaaatattttttagtatttttatatattgaaagagaggttggatgtataaataattttttatggtttttgggggtagtgaggggtgggaaaaggttttttagtttgagataagttttttgatggaattatagtttttgttgaggattttgatttggttaatagttggttaaagtgtattattttttttttttttcggttagattgatttttttatttaatagggtttttttggagtttggggtaggttggtgatttcgtgtatatatgtgtttatgcgtgtgtttatgtgtttgtggttaaatgtttaggttagtgaagtttgggttttggtttagtgtggttattttttgtttgtgtggttttggataagtgattttatttttttgagtttttgtttttatttttgtaaaaagggattattaaaaggatttagataggttgtgtgtttggttaaggtttgttatttgggtttttgggggatttgttataggagatggaggtaggagtatagggattttgtttttaggtataggtatttgggtagttatgaggagttttttttttgttttgttaaattaaagttataggtacgggttatgtgcgggggtttgaattttagtattagtagttcggtagtttttgattttcgagttatgaagttatttttgagtagtatttaatttttttggttttttatttttacgggtgttaagcgtttagtattttttttatttttcgggagagagtgatttttggttattgttttttttgtggtttgatttcgttttttttcgggaatttagtattttttttttgtgggggtggaagagggtgtatgagggttaggttttatttgtttttttttagaagtttagtggggagagtataggagtggttttgaagtagtttttttgggttttttttgtaatgataataattttattttagggatagatgtttttttttagatatttttttttgttaatggtagttttagttgagtgaaggattgtttggggtgttcgaaatagagatttgatttttttttattttgagttatgtagcgaacgttttgtgtgattttgggtaagtttttgttttgtttcgggtttagatttaagttgtgtgaaacgggaggataggagttttttgggttttggtattttgtgattttaagtagatttttagtttttgtagttatggcgtttggagaagatgggaatgttttttagcgggaggggtatggtgtattgaatttaatgaaaaattttaatttttttggtaaatattaggtattttagtgtttgaattaattagtagaataatgaattttgtttagagttgttgttttttgggtaaatagaagtttgagtttagaagttggaggaagggtgatgggtatttaaatgttttttgtgtttttgagggtatattgtttttattcggtggagttataggatgggagtagggtaattgatgtattgtagggttgttcgggatttttgatatttttttttggtaagcggtttggtgggagtggatttgagattttgttttgattagttgtgtttttatagggtagtggttgagtgatgattatgggtattggagtggatggtttgtgagggtagggattgtgtttttcggtgtttgtatggtgttggtagtagagtagatttgtgggagatgtttggaaggtaagattgaatttaggagtatatttttgagttattaggtttgggtagcgttttgatttgaggttgttttagggtgtgcgtgaggtagttttgtttgtttcggtttagattgatttagttgggaaaagtattttggattgggtaagattagaattaggagtttattttttgttttgtgtgaattagttgttattgtattatagagttttggagtgtagtattttagggttttgtgtatggagatttttggttttgaagttaggtagttttgcgtatgtaattttcgtttttttatttgttagttgtgttattaaaagaaaatgattttttcggttgtaaaaagaagtgaataatatgtttttagagttattaaaatagggtttagtatatagtaagtgttcggtaaaggatatttagttatattaataatttgattattattttatttattgtttttattttttttgagacgggggttttattttgtagtttaggttagagtgtaacggcgtgattttggtttattgtaattttcgtttttcgggtttaagtaatttttttgttttagtttttcgagtagttgggattataggcgtaagttattacgtttagttgatttttgtatttttagtagagacggggttttattatgttggttaggttggttttgaatttttgattttaagtgatttgtttgttttcgttttttaaagtgttgggattataggtgtgagttattgtgtttagttttatgtattatttttatttgtttagaatggaaagagatttgtttaaggatacgcggtgagttagaggtagagtgggatttaggacgtaggtttttaggttttggtttggtttttttttagtttttgaatgtttattttattagtttttgggtattagttgttatggagtattggggatgttggttgatgtgttttttttttttattttaga

SEQ ID NO: 202 - DNA, 14491 bp, Artificial Sequence
  chemically treated genomic DNA (Homo sapiens)
tttaagataaagaaaggagatatattagttaatatttttagtgttttatgatagttgatgtttaaaagttagtgaagtgggtatttagaaattagaaagagattaggttagggtttggagatttgcgttttggattttattttatttttaatttatcgcgtgtttttaggtaagtttttttttattttgggtaaataaaaatagtatatgaggttgggtatagtggtttatatttgtaattttaatattttgggaggcggaggtaggtagattatttgaggttaggagtttaagattagtttggttaatatggtgaaatttcgtttttattaaaaatataaaaattagttgggcgtggtggtttacgtttgtagttttagttattcgggaggttgagataggagaattgtttgaattcgggaggcggaggttgtaataagttaggattacgtcgttgtattttagtttgagttatagagtgggattttcgttttaaaaaaaataaaaatagtaaatgaggtaataattaaattattaatatggttagatattttttatcgagtatttgttatgtgttgggttttgttttaataattttggaggtatgttatttatttttttttatagtcgagggagttatttttttttggtgatatagttggtagatggaagagcgaggattgtatacgtagggttgtttgattttagagttaggagtttttatgtatagggttttgggatgttatattttagggttttgtgatgtagtggtagttgatttatataggatagggagtgggtttttggttttggttttgtttagtttaggatattttttttagttgagttagtttgggtcgggatagatagggttgttttacgtatattttaagatagttttaggttagggcgttgtttagatttgatgatttaggagtgtatttttggatttagttttgttttttaaatattttttatagatttattttgttgttagtattatgtagatatcgagaggtataatttttatttttatagattatttattttagtatttataattattatttagttattattttgtggagatatagttgattaggatagagttttaggtttatttttattaaatcgtttgttaaaagaaagtgttaaaggtttcgggtagttttatagtatattagttattttgtttttattttgtagttttatcgagtgggaataatgtatttttaagagtataggaaatatttggatgtttattattttttttttagtttttgggtttaggtttttgtttgtttagagaatagtagttttgagtaaagtttattattttattaattaatttaaatattaaagtgtttagtatttgttaggagagttggggttttttattaagtttaatatattatgtttttttcgttgaaagatatttttattttttttagacgttataattgtaggagttgggggtttgtttagaattatagaatgttaggatttaaggagtttttgttttttcgttttatataatttgaatttgagttcggaatagggtagggatttgtttaaggttatatagagcgttcgttatataatttaggatagaaagaggttaggtttttgtttcggatattttaggtagttttttatttagttgagattgttattgataaaggagggtgtttgagaaggaatatttgtttttaagataaggttattattattgtaggagaggtttaggaaagttgttttagagttatttttgtattttttttattgggtttttggggagaggtaggtggaatttgatttttatgtatttttttttatttttatagagggagaatgttggattttcggaagggagcggggttaggttataaggaaggtagtggttaggaattattttttttcggggagtggggagaatgttgaacgtttggtattcgtgggggtggaaagttagagaggttaagtgttgtttagagatgattttatgattcgggaattaggagttgtcgggttgttggtgttggaatttaagttttcgtatatagttcgtgtttgtggttttggtttggtagagtaggaggaaggttttttatggttgtttaagtgtttatatttaagggtagggtttttgtgtttttatttttattttttgtggtaaattttttaagaatttaagtgataggttttaattaagtatatagtttgtttaggtttttttaatagtttttttttgtagagatggaaataagggtttagaaaagtaaagttatttgtttaaggttatataagtaggaagtagttatattgggttagaatttaggttttattgatttggatatttaattataaatatataaatatacgtatgaatatatatgtatacggggttattagtttgttttaggttttaagggagttttgttaagtaggggggttaatttagtcgggagaaagaaagaatggtatattttggttagttgttgattaggttaaagtttttaataggggttgtagttttattaggagatttgttttaggttgagagatttttttttattttttattgtttttaggagttatggaaggttgtttatgtatttagttttttttttagtatgtgaaagtgttaagaggtattttaaaataatttatgggattagtatgtttattggttgttaggaattattttcgttttatattagagaaatgaaggttatgagcgaaagtggggcgtgaagattttgtagttaagttagtagtaaaattaaggttgaaattaagatttatttttagtttagttttttttgtgggtatttgtttatttttaattttttatttttatatttagtttttaaaaaagaaattagtttagtttgaagttatttcggggtttcgcggtacggtttggattcgattttattttaaagttttgaaaagatggagtttttaaaggttgtatttagatgagtttaggattttttttttatagtaagttaaggggttgggaagaaattttttttagtttttagtggtgataggaggatatagggaattaaatttttttttgagttttggaagttttttttttgttttgttttggttttttttttatttatgatttttgataagagggaaggtaattttaaagtggataagagttatttaggattaggttagtaagacgggattaagtttcgtgggattgtgggtaattatttttttttgtgtaaaggttgggaaggtattaacggtttttttttttttcgttttttttttagataaagtttattgagtttggggtgattttgaagaattaggttatttagtagttaggtttagttttgattagagatggatttcgttttgtttttggttaagaatgtggtttgttttttttagtttattttatttttgtttaggtatgtgtgttcgtgtgtatatatgtataggtattttttttgggtttttaagtttttttgtatttttgttttttttatgaatatataatagaaattattaattaagtaagatagtggtggttaggtatagtggtttaattttaatattttgggaggttaaggtgggaggtttatttgagtttaagagtttgagattagtttgggtaatatggtgaaattttatttttataaaaattagttaaatgtggttgtgtacgtttgtggttttagttattcgggaggttgaagtgggaggattatttgagtttaggaggtcgaggttgtagtgagttacgatcgtgttattgtattttagtttgggtgatagaggaagattttgtttttaaaaaataaaaaatagggtaatgggtttaggttttatagattttgttggttttgtggttggtggggatttgggattagtgtttgggggtttagagatattatatttttttttagattgttggggagaaagaagggaggggaagtgtttttttgttttatagaaattaatatttgttaatagaaggtatttgattttataatttagtaaatagataagataagggattttgttaaggttatttaagtagttggtagcggagatggatttagaatttaggtattttggtttttagattggaattattttttttttttttttagggtgttggttgtttttaagggttttagtaaatttataggtagtagttgttattatagttatattttttatttagttttttggttataggtatgaagttacgaaaaggttttattttaattttatttttaaattttatggtttttattattttaggaaaagtatgagtgattaaaaggagtatttattatatgttaagtattatgttgggtattttgtttatataagtttatttaaatggtaaaatagttttgtaaggtgttttatttattttgtagatgagaagattgaggtttagttgagttatttatttaacgttatgtaattagaaagttagagttgggatttaaatttagattttttttaagaatacgttttaattataattaggttttttattgttatttattttttatttttttttagtttaattcgttagtttataatatattggttgggttagggttttagggtaattttgtttttgtttaggagtaaataaaggtgaaagtgatattatttaaataaaggaatagaaatttggttggggtattagagaggagtttagggttagggtttggataattgtgaattaatgagagtttttttcgatttggtttttttttaggggaggtagggtcggggatatatttgattttttttttaggaggtaagattagaagggtaataattgggtaagttaaatttagtggggagaggggatggtgagtatttggggttttaatatttggatttattagaatgatttttagtaggagatttttagtagcgtatattattcgtaattgtttttttttattttatttattttttaagggttagatattttttagaatggttaaaatttggggtttataattgtgattttattatttagagtggttgtgtattaaggtagatttataagtgtgagttttgttattttttaattatatgagtttgggagtttattttatttttgaaatttttagtttttttttttgtgattagggttggtagtattttgtagggtgatgaggattaagaggaatgtatttgtgtgtgtaagggatttagtacgtgattaatgaatagtggttgtgattaatttttatttgttttttttttggttagtgggattagtgtttaaaggattagaggtttgggaaaatttgtagaggtagttttgttgttggaaggaagttagtttggggatagggagatggtgttttgtaaattgtaaaggaatataatttataataggttattattttgtttttgagtttagagattttttaataattaattaggtttttttagattgtgaaaaaaagatatagagatagttagagatttgtttaaggttatatagttttgattatttgttttaagtagatagaggtaaagattatttttatttttttcgaaggtgtaaatgatagtgattagaaatatttgaaattttatttggggatttgggtttttagggataaaataaataaataaaaatttagaaggtaaaaagaaattatatattaatttatggtttggtgttttggtgtttgaatggttaaattaggtttgggggtgggggtggagtgagggtttaaatgtcgtttttaaggtcgggttattttgaatataattatttaggagagagttaggtttggtattgtttgtaattagttttttattaagttttagggtagtttatttttatagtaagaattttaggattttagggtgttagttagaaatgggggaagggtttaggagtttttggatgtttttttgttaggagttgatttagtatttttgttattaattttttggatgatcgtggataatttttttttttgagttttagttttttaatttgtaaaagataggttttaaagagataagtttttttttgttttagtttagtaattaagttgggtattgtttcgattatcggtggagatagttaggagggggttggtttttttagggttttagagatagaggtgtattgaagttggagtttgtaatttaggtagtagattcgaaatttttgttggattcgagggttagggaggttttcgggatgtaaataaattttttgtgtttttagagtagagtagagagtttacgttgtagttttattttagttgattagattagttttgggtgttggttttttgtttttttttagttttttttatcgatttttaaggaagttattttttagattaggttagtttgttttatagacggtttcggtagggtttttttaaggtaaggagtatttttattttgggtagtcgggttagttatgtgttatatttgtttttacgtttagaggttagagtgatatcgttagttttcgtaggtttggttattgattgttgggttttattaagttattgtttttatatatattagtttttttttgttttttttttttattattttaggtgttatttgattagtagttttttttattgtgttagagaaaattggagtagtcgagttttcgggtttggaggatagggggaggggtgagatgtagtttgaaggggtgggggtcgttgaataggaaggtttgggttgaaggtgggggttgggggaagtaggaggtaagaataaggttgggaagtgggggagggaggaaggatggttgtagaaaggttaaagttagaaagaattgttgagattagagtgattttttggggagtattgtagttttttgaaaaggataaaaaggtttaaattttaataattgtaatttttagtttatatttttaatatatgtatagatattatttttttaaagttaaattttggtcgggttaagaattttcgtttaggtgttaataaagttagaattttataagtttgttaaatagcgatgatgatttttgagtgttataggtgttttatagaggatattggagtttatattaataaagtgacgtattaattgtgtgtgtttttgggtgagtagtagagttaggacgggggttggagttttttgtatttttttttttagttatttagtttttagtagatgggattagagaggttttagtgagatgtaagaatgtgtttaaggttattattgtgttagttaatgataaataagtttaagaagttaggtttatttttttaaggttaaatgagattttaattgttgatatatgtgtttttttttttttttttttagggtattatgtagtgaaaatatacgagaaattggttttttagaatattgtattttttttgtttattaatattttattttttaaagtgttatttgtaattatttagtttttttaagggtagaaattttgtttttttagtataggagggtgattttaggttttggatagtgtttagagtggtttgatatttttggtaaattttttgttttttttttttttaggttgtaaattgtttagtatgaggttttagtaaattttagtaggagaggtggggttgtttagaattggtttttgtttaaatataaatttattcgataattagtaaatagtttatttttaagataaataaataggagatttggattttaaaagttttattttagatttttttttttttattttttagttgtgggggtagataagggggataagggggatggagaaagttttttaggagatttgggtttagaatttttagagataggattttttggtatgaaggtggtttgggtaaggaagggaattgttattaagtaatattttttttttattaggtatggtattaggtgtttttatttatagttttgtcgttttttttaagtttcgttatatcggtattatgatttttttaatagattaggaggttggggtttagaggtggagtagtatgattgaatttatgtagttagtaagaggtggatttcgtacgtttggagttaagtttgtgtaatattaagttaatgttttaatgttttttggttagttttaggaagtaaagaggagtttttataaatattagaaaattttggggttatattaaatttgaatagtattagtttttgttttttgaaaaaatgtaggttagttgtagttttagttttgttttaaagaggaaaaaagtattatttgttttgtagaggtttaaagtttaattttgaggattggttgtataatgtataatgttaaagtttatatgtaggtaaggggttgtgaaagtgcgggatttagtataaatatgttttgtatgttttttcgagtttcggatattgaaatagtgatttttaaaggataaggtaaaattttgagtttattttaatatttttattatagagttgttttattagttaagagtttgaaaggaaatgggtgatttaggtaggttacgttagtatgtagtgatttatagcgttcggtttagttttttattttaattttaagtatttatttggaaattatattcgtttgtttagttcgggaggttgaaggatagttaggagttaattttttttaatagggagatggggttgggagtttagtttggtttttttagttttttatttaggtaggtttagtattttaagtttttggaaaagttttttgtttttaggagttggggatggtaggagttgaatgttttttcgttattttaattttttttttgagattgggatttgtttagattttttattaaggaggttagtaaagggtttttttttttattaatgggttttttgggtaggaaggatttttggaaggtaatggtttagtttttttattttagagttggggatattgagatttagagatagggtatgtttgtttaaggttatttagtaacgtagaagtaggatttaaggtatttatttttaaatttagtaaatttttttatttggaatattttgaggatatttaaattagatattttgttttattagaaggatttggttttgattttaggaagttattgtattgtttcgagtattaattttttgtaaaaatagagaaaatggtatttcgtagtattgggagatatttatattagtaataaataatagtaatgaattatttagaataaagttatatgtacgaatttatttatttatataagtattttttgagtataaattaggggataggtattttataaaaataaatagagtagagtttttgtttttagtgtgcggggggagagagggagggatttagtatttggtggagtatgttaatttttttaagttaatttttttaagagagagattttttttgaatagtaggtatttaagttattaattaaattgagagatggaaaggattttggaggttattttgtttaaattttttattttaaggtgggggatgttagtttagcggggaaagaggtttttttttaattttatggaattttttaaattatggtttaaatattttcgtgggtgtttgataattttttgggtttaagaagttttaagagtttttattgtttatttaagggttttagaagtttttaggttttcgtttttatttttatttttatgtaattaagaagaggacgttgtagaagattagaaatgtttttaagttaaagtatatttgataggtgataggtgggggatatttttttataatcgtttgggttcggggttaagttagtaggttgtgtttttgggtaggaatatttttgggtggaggggatttttaaaataaggttgtttttaattggtttgagagggagtggtaggaaggtagattagggaatgtttttagttggataggaagaattggtttagtatagtaagtttagttaaatagaggagaggatagttgggtattgagtttgggtttttttttaaaatatgggggtggtaaggggaatgatggaatagtcgggggaatattatttataatgggagggttattagttagagattttggggttttggatgttttttattaatttaaagtagtattattttattttttatatttgggaagtgggtataatagaatttttatgtgataggtttttttgtgaggataaaatgtattagatttgttatataaaaagtattttattatttttaattgttattagtaaagtttttttttttgggttttatttttttttatttgtaaaaagaaaaggatacgttggattatttttttagttcgagttaatcgtgattatgtttgatttttttaattataatttagaaaagagggaggggataggttaaaggggaagttttgtgttttagttataggtaggaggtttgtgatattagttaggaaggggagagttgaggttaggatgagatttgatatttattttaggaagtagttgtttagggttgatgttttttgtagttgatgggttatttaggtaggattgatatagttttttttttttaaattatattttttagaatgtttttaggatatagttgattgtttagtattttgaagtatttgaaggtttagtagtttttgggaggaaattggtatgtgattgggtatacggtgattttagtaattttttgggtttttttttttttttttttgtattgtttaggtggtattttttcggatgtttttttagttgtttgattcgatatattttttagggtttagtttagagtattgtgttagaggtagaaggtttgggtttttagttattaatattttaggtaaggtagtttttggtttaggttaagttattattttattttggttttgtttttttttattttagaatttttttgttttttagtttaaaattttaatttattttaaattcgtttttagttattaacgatgggatatttggagtagtataaagagtagaagttaagttaaagtagaaatttgaaagtttggttgtttaaattttaatttgatttatttatttattgtgtattaattgtgtgattttgggtaagttatttaatttttttagttttaggattagtttaagaatagtatatagtaagattgttgttggaattaagtttttggatatatttattagaaagttattagagtaatgtttggtttttcgataaaggcgttttacgtttgtaattattatggtatgtttggaattgtgttggaagtattgtttagggttttatttattttttaagaagagtttgtaggtagaattaatttttcgttaagtaaatttagaggaataggagttttaaggtttttaaagaaattaatattaatggttaaattgtaaggatttattcgttttgaaaattggggttaaagggtataaagggggtataaagtttaggttgtgggggatagattgtttttattagtaatttttatgttttttaattttttagatgagattgtttttttttttttaagtcggttgcgggtatggatagagtttttgttggtttagggatagttatgacggaggttagtggatagtgagaaggaaaggtttttttgggttgattgaggtttttttttttttttattttttttattttatttaaggtggatgttttaatttttttatttgtaattgagaaaaaatgaatatattttttgtagaaagtagaggtttagtttttggttaagtgttgagtttaaattattttttttttttgttttcgaaaagagtagagtttttaattttttagaaattttaacgtagtgtttttttttgttttatttttttagatttttggtgtagtattgggaagagatttagaagggtaggattttgttttaagttataagttaatgatagagttggggttagaattgaggttagggtttagttttttttggtgtgtgaaagagggtttcgtataattttaaaattttttttttttcgagtatacgtagtttttcgatttttagggttatttcggattttaaagttgtttgttttgggcgtttcgagagcgaggaggggatttagcgttttaagtttgttttagggttattagggaagggacgagggtgtgggagttgaagagttgatatcggtttagttattaacgagttcgtagttcgcggcggggttgaggttcggggaggcgggaagagtaataggcgaggggcgtacggcgcgtgaagttatttcggaggttggttcgtgatttcggagtaaagtttttaataaagtttttcgggtttcggtgttcggttgggggtagcgtattttcgatttgtttttttttattttacgtttcgacgaataaaggaggtatcggtttgcgttttcgtttcgtttttagttcgggaatttttaagtatttatcgattcggcgatttcgtttacgaagaatagtagtagcgcgaatagacgggcgggggttatggtatcgcggattggagaaggcgcgtaggttgcggcgagtggtttcgggcgggcgcgttatttattttataggcggtttatcggtttcgtttcggttcgttttcgtttcgtcgttcgtatttcgttcggaattttttagtggaagcgaggtttgcggggtattgcgttcgttcgcggagttggaaattttaagggattcgttttgttcgagttcgtcggtttttatttaatttttagttttatttttcgggaggtttaattttttttatttatttgatttattgttaggtaggtttttagagattattgcggttaattttattttatagttggggaaattaaggtttagggacgggaaggatttttttagggtgttgagtttagattagtttttatatcgggtgtgtttttttttgaagatatagaattttttaaatgggatgtgaatcgtgttaagataggggatagtaaattattttgtaaagggttaaatattttaggttttgcgggttatacgatttttgtggtaattatttaaattcgagcgtcgtagtttaaaagtagttataaatattaaaggaatgagggtagttaggttttaataaaatattatttatagatatcgatatttgaatttaatataatttttatgtgttacgaaatattattatttttttgattttatttttaattatttaaatatgtaaaaatcggttgggttttatggtttacgtttgtaattttagtattttgggaggtcgaggaataggaggattttttgagtttaggaattggagattagtttgggtaattataatgagatttttatttttataaaaagtttttaaagaaattaattaggtattgtggtgtatttttgtggtttagttattttggaggttgaggtgggaggattgtttgagttagagaggtgaaagttgtagtgagttatgatcgtttattgtattttagtttgggtgatcgagtgagattttgttttaaaaataaataaataaataaataaataaataaataaataaataaatgatattttataataaaaatgtaggtcggatgtagtgagttatgtttgtaattttagtattttgggaggttgaggcggcggattatttgagtttaggagtttgagattagtttggttaatatgttgaaatttcgtttttataaaatataaaaattatttaggtatggttgtttgcgtttgtaattttaattgttttggaggttgaggtaggagaatcgtttgaattcgaggggcggaggttgtagtgaattgagatttttttattgtattttagtttgggtaatagagtaaaatttcgttttaaaaaaataaaaaataaaaatgtaaaaattatttttagtagtgggttgaataaaaataggcggtgggttttagttattttgagattattttgacgttggttttagagtggttgacgtttgttttaagggttttatttattagattttgaatttttttaaaagtttgatttttttgagaattggtttgtaagtttatttttatttttagggtaagtttttattttttataagagaaagttgtgtgttttttttattttttatttttttaatagtgtattggtgggagtaggttgagggaagaagtggaggggggtgttatatggagattgtaaaattttttgggtttttaagtatacgtattgttggaattattgtagggtgtgaaggtgggtattttacgatgatcgaagtataaaagaagtttaattttgtttttttttgatttatgtataaatttttttaagggtgtaatatagttttagaagtaggatattttggttattgttggtatattatgaatttatatattttgtggagtggagaattggtagtgatttttttttttttattttttaattattattaaagaataaaagttttttgtggtagagaattttggtagtaaagtaaattttaaatgttgattacggggtttttatagatttaaaggtaagtaatg

SEQ ID NO: 203 - DNA, 2534 bp, Artificial Sequence
  chemically treated genomic DNA (Homo sapiens)
aggtaggaaagtgggatagtcggggagttggattttattttttgtgagtttcgttggtatttgatggtatgtggtttggagagggtaggtgatttggcgtggagggttagagggtaaatttttaaataagtggtaataggttattaatttgaaagggaaaattgtgtagtgatgggaaatgtgtttaataaatttattgggtgattaattataaaggttgggttggagttttagaggttgtttgttaaatattttattaagcggtattttgaaagttgttatttgcgtattttgggagtttagaggggattttgagggggaatgaggtttggaggatggaattatttttaggtagattgagaaggagtttggattttatttttaaatatagtttggagtttataggttagaggttttaatgggagaaaagttaaaggaagagggtgtagaaaggagttttagggaattggtggttatgtgattttgagtaaattttatttttttttgagatttagtgtttttatttttatggttttgtgtgtgttatagagatatggtggggattaaattcgatcgtgatatgaaagtgtttgggaaattttatggttttatttaaatatgagttatttttatttgaattaaggggggaagttatttggtaggattaggaattttatttttttgaatttttatgggttttgtcgaggttgaagtagttaggggttaaagttagtttttagtttttggaagggtattgtgaaagtggatttgatttgagaagtcgttttttgatgtgggtagttatgtgatgttagtttcgaataagagggggtagtttggagtttggaaaggtgttagtgtaggtggggtttacgtttagattttttttgttgattgttttgatgatttatttttatattttagtttttttatttttattgtagagtcggaaagggtgtggggaagagaggagagggaggtaggttttgggttttggtttcgttttttgtttttttttatttttttttgggtttggttatttagttaaaaggtaggttaagagtaggagagatatagagttcggtattggttttaggtagtagttagttcgtcgttcgtttgtgtgtttttagagttatggagagagttagtttgatttagaaggttaagttggtagagtaggtcgaacgttatgaggatatggtagtttttatgaaaggcgtcgtggagaagggcgaggagtttttttgcgaagagcgaaatttgtttttagtagtttataagaacgtggtgggcggttagagggttgtttggagggtgttgtttagtattgagtagaaaagtaacgaggagggttcggaggagaaggggttcgaggtgcgtgagtatcgggagaaggtggagattgagttttagggcgtgtgcgatatcgtgttgggtttgttggatagttattttattaaggaggtcggggacgtcgagagtcgggttttttatttgaagatgaagggtgattattatcgttatttggtcgaggtggttatcggtgacgataagaagcgtattattgatttagttcggttagtttattaggaggttatggatattagtaagaaggagatgtcgtttattaattttattcgtttgggtttggttttgaattttttcgttttttattacgagatcgttaatagtttcgaggaggttatttttttggttaagattattttcgacgaggttatggttgatttgtatatttttagcgaggatttttataaagatagtatttttattatgtagttgttgcgagataatttgatattgtggacggtcgataacgtcggggaagaggggggcgaggttttttaggagttttagagttgagtgttgttcgttatcgtttcgttttgttttttttagttttttattttgtcgagaggattagtatggggtgggaggttttattttttttttttaggcgttgtttttgttttaaagggtttcgtggagagggattggtagagttgaggttatttggggttggggattttattttttttgtagttgttgagcgtatttaattattggttatgtttttatttttgtttttcgtattcgttttttttcgattttaggattaggttattttttttttttttttgttttttttttgtttttgttgtttttgatcgtaggaattgaggagtgtttcgttttgtggttgagaattggatagtggtaggggttggagatgggtgtgtgtgtgtgtgtgtgtgtgtgtgtgtgcgcgcgcgttagtgtaagatcgagattgagggaaagtatgtttgttgggtgtgattatgtttttttttaataaagtttttttgtgatattttttttgttttttttttagtttttggcgatgggttgggagtgggattggaatttgatttagagattttgattttggatttttgagttagggttttgaattttttaggtggtttagtggttcgtacgtaagattttgagtttaggtgaggtcggggttt

SEQ ID NO: 204 - DNA, 2534 bp, Artificial Sequence
  chemically treated genomic DNA (Homo sapiens)
ggatttcggttttatttggatttaaagttttgcgtgcgggttattgagttatttagggagtttagggttttaatttagaggtttaaagttagggtttttaagttagattttagttttatttttagtttatcgttaagaattggaagagagataggaggagtgttataggggaattttattgagaggaaatatggttatatttagtagatatgtttttttttagtttcggttttgtattggcgcgcgcgtatatatatatatatatatatatatatatatttatttttagtttttgttattgtttagtttttagttataaggcgggatattttttaatttttacgattagaggtagtaggggtaggagggaggtaagaggaggggagaagtagtttggttttggggtcgggaggaagcgggtgcggagagtaggggtgggggtatgattagtggttaggtgcgtttaatagttgtaagaagagtgggatttttagttttaggtggttttagttttgttagtttttttttacggagttttttggagtaagaatagcgtttaggggagaagggtggggttttttattttatattagttttttcggtagggtgggggattggagggggtagggcggggcggtggcgggtaatatttagttttggggtttttggggagtttcgtttttttttttttcggcgttgtcggtcgtttatagtgttaggttgtttcgtagtagttgtatgatgagggtgttgtttttgtaggagttttcgttgagggtgtgtagattagttatggtttcgtcgaaagtggttttggttagagagatggttttttcggggttgttggcgatttcgtagtggaagacggaaaagtttagggttaggtttaggcggatggggttggtgggcggtattttttttttgttgatgtttatggttttttggtaggttgatcgggttgagttaatgatgcgttttttgtcgttatcggtggttatttcggttaggtagcggtagtagttattttttatttttaggtagaagattcggttttcggcgttttcggtttttttgatgaggtggttgtttagtaggtttagtacggtgtcgtatacgttttggagtttagtttttattttttttcggtatttacgtatttcgggttttttttttttcgagtttttttcgttgtttttttgtttaatattggatagtattttttaggtagttttttggtcgtttattacgtttttataggttattgagagtaggtttcgtttttcgtaggagagtttttcgtttttttttacggcgttttttatgaaggttgttatgtttttatagcgttcggtttgttttgttagtttggttttttggattagattggttttttttatggttttggggatatataggcgggcggcgggttaattgttgtttgggattaatgtcggattttgtgttttttttgtttttggtttgttttttggttgggtggttaggtttagagaagggtggggaggagtagggggcgggattagggtttaagatttgtttttttttttttttttttttatatttttttcggttttgtagtaaaggtaaaaaggttgggatgtgggggtgaattattagaatagttagtaggagaaatttgggcgtgggttttatttgtattggtatttttttaggttttaggttgtttttttttgttcggggttggtattatatggttgtttatattaggaaacggttttttaaattagatttatttttatagtgtttttttaggggttaaggattggttttagtttttggttgttttagtttcgatagagtttataaaggtttaggaggatggggtttttaattttgttaggtaatttttttttttggtttaggtgaggataatttatgtttaggtagggttatggagttttttaagtatttttatattacgatcgaatttaatttttattatgtttttgtgatatatataggattatagagatgggaatattaagttttagagaggggtgagatttgtttaaagttatatagttattaattttttgaaatttttttttgtattttttttttttagttttttttttattgaggtttttgatttatgagttttagattgtgtttggaagtgagatttaggtttttttttagtttatttgaagatggttttattttttaggttttatttttttttagggttttttttgagtttttagaatgcgtaggtggtagtttttagagtgtcgtttaatgaagtgtttaataagtagtttttgaagttttagtttagtttttgtaattagttatttagtaggtttgttggatatattttttattattatataatttttttttttaagttggtggtttgttgttatttgtttgaggatttattttttggttttttacgttaggttatttgttttttttaagttatatgttattaggtattagcggggtttatagagggtggggtttagtttttcggttgttttatttttttgttt

SEQ ID NO: 205 - DNA, 3716 bp, Artificial Sequence
  chemically treated genomic DNA (Homo sapiens)
atttatttgtttatttttagggaaattagattaataaagatttggaaaggaatataaaattttaaagttaggtttatggtttttataatttttagatggggtagataatatgttacggaggtttagagatagttttgagattatgtaatagttattgtttttttttttgtggaatgtttatttaaaaaagtttaagggttttataagttgtttaatgaattttatagatatttttaatttatttttatttattggaatttttttttaaataattttttaaattttacgtaataatgatgtatatttttgtttaatattaagaagtttttatgtaaaattgaagaaataaattgtttttataaaagaaggaaaaaggaattatatttttagaatattttgtttatttagatatatagatttgatttttgttttattgtttgtggtattttggattttagggttattgatgaggttgggttagtggttatattggtttttgggtattttttttttggttataaaagtttattttagtagtattatttaaattggatttattttttattttatagttttggtttgggttgagatttttttaatagagtttattagcgagtttgttattttgttttgtggttatttaggtttggagttaagagttatttataggaaaattagtatgaaatttttaagtttgtatattaaatattaatattattaagggttatagtggaaaagaggtttgttgagtttaagggtttttattttatttttaattttttttggttttttttttttatgttgtgtttttggtaaattttattatgtttcgattattttaggtttttttagtttttttttgggaattaggttttttggataggtaaagaggtagatatttagttgttaggtgaattagatgtttttattagattttttaatttttattttggtgatattttaaaggattataaattatgtttttagtgtttggttagagaattgggaaagagttggaagatgagatattaaattttattttatggtgatgtttgaattaggttggagttggttttatatgttttttattgtgtatgatttttttaattgttttagtgggaatgcgttattgtaaaataaagtgaaattgttttttttattgtttgtaatttatagaggggtggttttgattatataaattaggtattttttaaatttattgattttagggtggaaggagggatttttttttaagtatttatttcgaattatgtttttattagtaaatttaaagtttaagggtaaaaatttatgattttttattttgtaatagttattagatgtttatagtatattagatttgtggaaaacgtatgttttgtgtatggaagagggagagggagcgttaggagttgttttttgttaaaaaacgtattttgatatttaaaggtataggttggtggagatttagggaattcgggaaagtttaggtttaatttaggttcgcgcgggttttttttgattttataagatgaggagtgggttttggttttgggtattttggtgtcgattgtgagtttttagtagaggtttagagtttcggttcggtagtcgagggaagcgggggggttttttagaagaagaaagggttaaggttatttcggtgtttttttagtagtagtagagggcggcggtcggtgtcgttgttggtcggggtttcgaggaaggcgcgggttagttggggtcgggtttgcgtttttaggagttgttatcgttttagggagtaagttaggtcgggacgtagcgtttgcgcgggatttttatttgttattaagatttttataaatttcgttttattttgttttacgtttcgttttaaggtcgttttttcgattcggggtttcgttttaaggtcgttttttcgtttcgtcgtttggtggcggtcgtatgttgttcggatataaagggtcggttttatattttagggattagcgagcggttttgagaggttttggtttttgttttttaggcggttcgaggacgttatggtcgagtgttcgatattcggggaggtagttatcgattattcggatcgtttgtgggtttgggagaagttcgtgtatttggacgagaagtagtacgtttggttgtttttaattatcgaggtatagttagttttggagcggatggcgaggtagtaggggtagtttttgggagtttgggatgttttaggaagggcgaggatttaaggagtatttattatggggtagggaggatttttatagatgaagttattttgagtcgggttttggaggatgaataggagttttttaggtagggaagaagggtgggaaaatcgtaaaggaatgtcggttaaaggggtggatttagtgtttgtggagtgtgattataatgttgattatagtaggtattttttgggtttcggggttttaatttttaaaaatgggtatttttaagtgatttatttatatggtcgattatcggaattattttaggtgggttttagaaatttgtatttttaaaaagaatttttaatagtttagggttaattaggtatagtaaatattggtttagagtgtgaagtattttttattatttttgggttttatttagaaaataaatttaataagtgatgtcgtagtataagcgtcggtattgaattaatattgatttttttaatgtgtgatgttttaagatgggtttttaatttatgttaagtttttgttaaagaaatagataagttttttataagtatttggatttatttaatgaaaaagagttaaaaaatgtttaaattttttttaaatatatattgaagaaagtataaaaattaaaaaatatattagaatacgtatgtttagtagtaattaaaaattattgagtgttgattgtgtttttatagatgggaaattgaggtataaaaatgtatatttgttcgaggtaagattgttagtaggtaatggggttggaattttaggtttttaattattataaaatttgtatttttattggtattttaattttttaaatatgtttttattttaaaaattaagttaaatatttatttttttaaaattaaaatttgaagaaataatttgaagatttagtggatttttttttttaaatttttgagaaattttttttttaacgtgatattaaaattacgaattagatagttttttataaaattatgatatatgttttataaaaaataatttattagtaaattgtgggatagattttgttttatattattgaaaaggttagtattttttttttttttttttttttttgttgtttttttttttttttgtagatatagggtttcgttttgtgatttaggttggttttaaatttttggttttaagcgatttttttgtttttgttttttaaagtattggaattataagtgtgagtcgttgtaattcgttagaaaaaagtgtgttttttatggttttgtttgggtggttagatacgtgtgtgtgttggtggttttggtttagttagagtttttgagaggagtatgtatggtttaaggaagtgagttttagggaatagtgatgattattattttatattcggatttttgtttagatgggtggatggttggtaggagggatttcggttttttgcgtttggagaagttttggtaagcggaatttgaaagtatgttttgttttttttttttttttaga

SEQ ID NO: 206 - DNA, 3716 bp, Artificial Sequence
  chemically treated genomic DNA (Homo sapiens)
tttgaggagaagaaaaggatagggtatatttttaggtttcgtttgttagggtttttttaggcgtagaaaatcggaattttttttgttagttatttatttatttgggtaggggttcgagtgtgaaatgatggttattattgttttttgaagtttatttttttaggttatgtatgttttttttagggattttggttgggttaggattattagtatatatacgtgtttagttatttagatagggttatgaaaggtatatttttttttggcgggttgtagcggtttatatttgtaattttagtgttttggaaggtagaggtaggaggatcgtttgaggttaggagtttaagattagtttgggttatagagcgagattttgtatttataggaaaaaaaaaaaataataaagaaagaaagagagaaaaagaatattggtttttttaatgatgtgaggtaaaatttgttttatagtttgttagtgggttattttttgtggagtatgtattatgattttatgaaaaattgtttggttcgtggttttggtgttacgttgaagaagagattttttagagatttaaaaaaagaaatttattgaatttttaaattatttttttaaattttgattttaaaaaagtaagtatttaatttgatttttaaagtaaaaatatatttaaaaaattgaaatgttaataaaaatgtagattttgtggtggttaagagtttagaattttaattttattatttattagtaattttatttcggataaatgtatatttttgtgttttagttttttatttgtagagatatagttaatatttaataatttttgattgttattggatatacgtgttttaatatattttttaatttttatgttttttttagtgtatgtttggagagagtttgaatattttttgatttttttttattgagtaaatttaaatatttgtaaaagatttatttatttttttaataaaaatttaatatggattaaggatttattttaaggtattatatattaaaaaagttaatattgatttaatatcggcgtttatattacgatattatttgttaaatttgttttttaaataaagtttagaggtagtggaaaatattttatattttaggttagtgtttgttatgtttggttgattttaaattgttgagggttttttttaaaaatatagatttttgggatttatttgagatgatttcgataatcggttatatggatgagttatttagagatatttatttttaaggattaggatttcgaagtttagaaaatgtttgttgtagttaatattatagttatattttataggtattgggtttatttttttgatcgatatttttttgcggtttttttattttttttttttgtttggagaatttttatttattttttagagttcggtttaaagtggttttatttgtggggattttttttgttttatagtgagtgttttttgagttttcgttttttttagggtattttaagtttttaggggttgtttttgttgtttcgttattcgttttaaagttggttgtatttcgatggttaagggtagttaggcgtgttgtttttcgtttaaatatacgaattttttttaggtttataggcggttcgggtggtcggtgattgttttttcgagtgtcgggtattcggttatggcgttttcgggtcgtttaagaagtaagagttagagttttttaaggtcgttcgttggtttttgggatgtggggtcgattttttatattcgggtagtatgcggtcgttattaagcggcggggcgggaggacggttttggggcgggatttcgggtcgggagaacgattttggggcggggcgtaaggtaggatggggcggggtttgtgggggttttggtggtaagtgagggtttcgcgtaggcgttacgtttcggtttgatttgttttttggaacggtggtagtttttgggaacgtagattcggttttagttggttcgcgtttttttcgaggtttcggttagtagcgatatcgatcgtcgttttttgttgttgttggagaggtatcggggtgattttggttttttttttttttggaagattttttcgtttttttcggttgtcggatcgggattttgggtttttgttgggaatttatagtcgatattaggatgtttagagttaggatttattttttattttatgggattagaagagattcgcgcgggtttgagttaggtttgggttttttcgggttttttggatttttattagtttgtgtttttgagtgttagagtacgttttttggtaaaggataatttttgacgtttttttttttttttttatatataaagtatgcgttttttataggtttgatgtgttgtggatatttaatagttattataaaatggagaattatgggtttttgtttttgggttttgagtttattagtgaaagtatagttcgaaatgaatatttaaaaagaaatttttttttttattttaagattaatggatttgaaaagtgtttggtttatatgattaaaattatttttttgtaaattataagtaataaggaaaataattttattttattttgtagtaacgtatttttattaaggtaattaagaaagttatgtataatgaaaaatatgtgaaattagttttagtttggtttaaatattattatgggatggagtttggtgttttattttttagtttttttttagttttttgattaggtattaagaatataatttgtgattttttgaaatattattaaagtggaaattaagagatttgatgaggatatttgatttatttggtagttgggtatttgtttttttgtttatttagagagtttaatttttaagaaggggttgagagggtttaaggtagtcgagatataatgggatttattaggaatataatatagaagagaaaagttaagggaagttgggggtggagtgagggtttttgagtttagtaaattttttttttattgtagtttttagtggtgttaatatttaatatgtaaatttaaaggttttatgttgatttttttgtgaatggtttttgattttagatttagatagttatagagtaagatgataagttcgttaataagttttgttggggaggttttagtttaggttagagttgtgaagtgagaaataagtttagtttaaatagtgttgttgggatggatttttgtggttagggaaggggtatttaggagttagtgtggttattgatttagttttattaatggttttaggatttagaatgttataaataatggagtaagaattagatttgtgtgtttgggtaagtagaatgttttgagaatataattttttttttttttttttgtaagaataatttatttttttagttttgtatgagggttttttaatattgagtaagaatatatattattattgcgtgagatttagaaaattatttgagagagggttttaataaatgaaaatgaattaaggatgtttgtggagtttattgggtaatttatagagtttttgagtttttttaagtgaatattttataagaggggaaatagtagttattgtatagttttagagttgtttttgagttttcgtggtatgttatttgttttatttaagggttataaaggttataagtttagttttagaattttatgtttttttttaagtttttgttagtttgatttttttgaggataagtaaatggat

SEQ ID NO: 207 - DNA, 3432 bp, Artificial Sequence
  chemically treated genomic DNA (Homo sapiens)
ggaggatagaaatataaattaaagaatgatataaataattataaagttatagttgttaaaagaaaagtatatggtgttaagagaacgtgtaatataagatttatttatggaggtgagggaaagtttgtttattaaagaagttatgatttaatttacgaagattaggagttggttgggtgaagaaaaaaaggttagaggaaggaagtttatattggggaaggttttaagtataaagggtaggaggattatagaggtatatttacgaaatttggagaaggtttttagtaagtaaggagaagttaaatgaaagtttacgggagagttggaggtttgaagatacgtttaaggatttggtttttattttttttttattttaagagtagtgggaagttattaaatgattttaattagagggttggtataattagttttgtattttgaaaagttgaatttagttttcgtttgagaaattgagtgaaagagtttagaacggtcgtggttgagggtgattcgtgggagatttttatataagttatggtagtggtatgggttggtggtagaagagggaatagggagaagatttggaatttaatttttttttattgataaagttattttagttttggtaaggtaattaattggtgggaaagaagatgtttagtttttttgattttattgtattttttgtatttttaatatgagtattgggaagtggtaaaatatttagaggtagtttgggtgttaggtggagtatgagttaaaattttaggatgaagtaaatgaatatttagaatgataggaaagatttgggagttgggtttgggggagggttatttatttttattttttggagattttggtataaatttttgtttttgtaattttttttttaggtaaaggaatttattaaatgaattgttagaagatttattgattagagggttgtatagaattatatttttgagagtgggaagtaggttgattatatagtttattatttaattaggatatatttgaaagagaaagggggttttattaatatttaaattataaaatatgtatattaggaatgttttgggtaaatttggttgttttagtaagaaaggaaatttgaaagtttatattgttttgtttttatgttatttcgtttgtatatgagagggtaagtattttttttttttatttgtattaagggaataaaagtataagtatttaggtgatttttaatttatttttaattttatagtttttgttatattttatatattttgaaaattatattttttattattattatttcgtgataggtgattatttataattatttattgatttagtttcgggaagaggcggtgtaaaatgggacgttttatttaggtgtttattagaaatgtagaatttttgtttgttttttagatttattgaattagaatttgtatttttaaataagatttttaggtgattaatatgtatattaaaatttgagaaaaatttttagatttcgatttaaagaaaaatattttataatttgatagtgtatgtatatatatatatgtatatagatataattgaagtataaatttaatgaagtagaatttatcgttattattttatttgggaaagaaatgtgttcgcgatttaatagattggagtatttatttttggattttaatttgtaatttgaaaacgtatttttaaagtatttaggagtaatttgaagaaagttgaggggaggcggtagatgttttgatttattagggaaaacgtggacgttttttgttgttattttgtgaattgtgtgtatttagttatttttgagtaaatatttggagcgaggaatttttgagtggtgtgggagggcggtgaggggtagttgaaagtcggttaaagttttcggaggggttggtttaggaaatatgattggtagttacgagagagttaggggttggacgtcgaggagagggagaaggttttcgggcggagagaggttttgtttagttgttggcgaggagttttttgtttttttcgtagcgttgagttgaagttgagtgagttattcgcgcgtacggagcgacgatattttcgcgcgtgtattcgttcgggataggagtcggatttttgtgtagtttttttcggtcgtcgggggttttttcgcgtttcgtcggtttttaggtttttttttggttggcgagcgggcgttatatttggttcgtatatttgcgttgtcggttcggcgcggggttcggagagggcgcggcgcggaggcgtagttaggggttcgggaaggcgtcgttcgttgcgttgggggttcggtttatgacgagtagcggggtttgttatgggtcgggggttgtttaggggtttgtggtcgttgtatatcgttttgtggacgcgtatcgttagtacgattttatcgtacgtttagaagtcgggtgagtggtttttagttcgggttcggcggggcgtcgggggtttttttggggttttcgttttttcgttgcgtttgatagtcgggttcggtaattcggttttcgggcggaaacgaggaaagtttttttcgcgatatttacgtagttcgattttcgtagttgtagggattgtgagttttttttgaaaaagagaaggaaagtttagttgtaaggggcgcggggtacgtttggttttttttgtgcgagtaggaaaggcgttgtgttggtcgcgttcgaggcgagtttttattttcggaaagggaagtttgagaagttggttatttgaaggcggtcggggagtagcggttcggagcggtagtttgagttgttaaagtagttagcgtatttgggttatttcgtttatggcgatgtcgcgtgtttatttagttttttttgagttattcgtttaaaaggttagttttttagtttttagtttttggagacggttacgtttttttttaggtcggttttttggttcggagtttttggaaataagttttaagaaaataatcgatttttaaaagaaagttagttggttttattgacgttttggtatggatggatagggagtggagatgtttaggtgaaatcgagaattttttattgaatgtttattgggtgttagaggttgtagattttgtttggaataagatagttttgtttttagggagttgatggttttatgtaattatcgtttgttggaaatcgaagggttaaaattttaattaggttatttatttgatcgttgtttttgaaggtttttaaggaaaaaataaaaataaaaaaatatatatatatattatatatatataaatatatatataattatatatataaatatatataatattaatatatatatgtatgtaggaatgggggtttttaattatttgttatggaaagtgtaaaatttttgagattttaaaagttagattttttttttttggagacggagtttcgtttt

SEQ ID NO: 208 - DNA, 3432 bp, Artificial Sequence
  chemically treated genomic DNA (Homo sapiens)
agagcgagatttcgtttttaaaaaaaaaaaatttaatttttgaagttttagaggttttatattttttataataaatagttaagaatttttatttttgtatgtatatatatattaatattatatatatttatatatataattatatatatatttatatatatataatatatatatatatttttttatttttattttttttttaaaaatttttagagatagcgattaggtgggtagtttagttaggattttaatttttcggtttttaataaacgataattgtatagaattattaattttttgaagataggattattttgttttaggtaaaatttatagtttttagtatttagtaggtatttagtgagggattttcggttttatttgagtatttttattttttatttatttatgttaaggcgttagtggagttagttaatttttttttggaaatcgattatttttttgaaatttgtttttaaaaatttcgggttaagaagtcggtttgagggaaagcgtggtcgtttttaggagttaaggattgaggagttggttttttgaacgggtggtttaaaaagagttgggtgggtacgcggtatcgttatgggcggagtggtttaggtgcgttggttgttttggtagtttaggttgtcgtttcgggtcgttgtttttcggtcgtttttagataattaattttttaaattttttttttcgggggtgggggttcgtttcgaacgcggttaatataacgttttttttgttcgtataaaggggattaaacgtgtttcgcgttttttgtaattgaatttttttttttttttttaagaaaaatttataatttttgtagttacgggagtcgggttgcgtgagtgtcgcgggggaaatttttttcgttttcgttcgggggtcgggttgtcgggttcgattgttaagcgtagcggagaggcggggattttaggaagattttcggcgtttcgtcgagttcgggttggggattatttattcgatttttgaacgtgcggtgggatcgtgttggcgatacgcgtttataggacgatgtgtagcggttataggtttttgagtagttttcgatttatggtagatttcgttgttcgttatagatcgagtttttagcgtagcggacggcgttttttcggatttttggttgcgttttcgcgtcgcgtttttttcggatttcgcgtcgggtcggtagcgtagatgtgcgggttagatgtggcgttcgttcgttagttaggagggggtttggaggtcggcgaggcgcggggaggttttcggcggtcgagggaagttgtataggagttcggtttttgtttcgagcgggtgtacgcgcgggggtgtcgtcgtttcgtgcgcgcgagtgatttatttaattttaatttagcgttgcgggggaaataggaaatttttcgttaatagttgggtaggattttttttcgttcgagagtttttttttttttttcgacgtttagtttttagttttttcgtagttgttaattatgttttttagattagttttttcgagagttttggtcgatttttagttgttttttatcgtttttttatattatttaggagtttttcgttttaagtatttatttaagaatgattaagtgtatatagtttataaagtaataatagaaaacgtttacgttttttttagtagattagaatatttgtcgtttttttttagttttttttagattgtttttaggtgttttagagatgcgtttttaaattgtaagttgagatttaggagtgaatattttaatttattgagtcgcgagtatattttttttttaaataaaatagtaacggtaaattttattttattaaatttgtgttttagttgtgtttatatgtatgtatgtatgtgtatatattgttaagttgtaaaatgtttttttttaggtcgaagtttagaggttttttttaagttttaatgtatatattgattatttggaaattttatttaaaaatgtagattttaatttagtaggtttaggaggtaggtagagattttgtatttttaatgagtatttggatagagcgttttattttgtatcgttttttttcgggattgagttagtgagtaattgtaaatgattatttattacgaagtgatagtggtgggaaatgtaatttttagaatgtatagagtatagtagaaattgtaaaattaaaagtgggttgggagttatttgaatgtttgtgtttttatttttttaatgtaggtgaagaaagagaatatttatttttttatgtgtaaacggggtaatatgggagtagaatagtataaatttttaaatttttttttttgttagggtaattagatttgtttaagatatttttggtgtatatgttttgtagtttaaatattaatagaatttttttttttttttagatatgttttgattggataataaattatgtgattaatttattttttatttttaaagatatgattttgtatagttttttggttagtagattttttagtaatttatttaatgaatttttttatttgagaggaagattgtagaggtaagggtttgtgttagggtttttagggaataaaggtaaatagtttttttttaaatttaatttttaaattttttttgttattttaagtgtttatttgttttattttggaattttaatttatgttttatttagtatttaagttgtttttggatgttttgttattttttagtatttatgttgaagatgtagaaagtgtagtgaaattaggagggttaggtatttttttttttattaattaattgttttgttaaagttggagtgattttgttaatggaggaagattgagttttaaattttttttttatttttttttttgttattagtttatgttattgttatggtttgtgtaggagttttttacgagttatttttagttacggtcgttttgggtttttttatttagttttttaaacgagagttgaatttagttttttaaaatataaaattagttatattaattttttgattaaaattatttaatggttttttattgtttttgagataaagagaagataaaaattagatttttgaacgtgtttttaagtttttaattttttcgtaaatttttatttggtttttttttgtttattgaaagttttttttaaatttcgtgaatatgtttttgtaatttttttattttttatgtttagagttttttttagtgtggattttttttttttgatttttttttttttatttagttaatttttggttttcgtggattgaattataatttttttgatgggtaagtttttttttatttttatgagtagattttgtattatacgtttttttggtattatatgttttttttttaatagttgtaattttataattatttgtgttattttttaatttatatttttatttttt

SEQ ID NO: 209 - DNA, 3077 bp, Artificial Sequence
  chemically treated genomic DNA (Homo sapiens)
ttatatcgtgtatgtaatgtataagtatttatttcgtttgtttggggttttgtttgtttttgttgagttcgatttttttatttgtcgtttggtttttgttttacgttttagtgttattgagattaaggagagaacgaatttgtcgttgattgggtagagcgagcgcgtggatcgcggttatcgttcgtttattattcgcgcgtatttgggttggtatcgggcgaagaatcgtgcgggtttgggatttgggggtttagagggagcgagtttttgcgcgggcgttcggttcgtaggtttcgtaggtttaggggcgtgtttcgtttttatttttatttcggatttcggtttttttttttagatagcggttttttttatttttggttttcgtaggtcgttagtagttcgcgttaggtttcgtcggcgtttttagggttttttagatcgcgtagattttgatattttcgtttggttttgggttttgggagttgagagtcggttagggttttgttcgtattttcgggcgtttagtttcgggtttgtttttcgcggacgttttaattttttcggtcgaatggatggtggtgcgcgcgcgttttatttcggcggtgtcggttttttttgttgttaaaattagatttaaatttttgtatgggattcgtttttgggtttttatttcgtgcgtttagtaaatagtgggtgagttatgaagatgtgcgagttagtcggatttttttcgttaggcgcggattcgttgcggttagagaatttagtttgcgttagttcggttcgttcgcgaagttacgggttttattgacgcgattttttaagacgtgggggttattatgggtagaggatatcggttcggagttagattacgggttttataagtattagattataagtagcgtcgttattgagagtcgttcggaattcgtttagtatgtcgggttttttagttagggtttggtgtacgtggtcgagggttttggaagtttcgatggtttaggaggagtaggcgggcggggcggcgggtgtcgttggtcggtagagagtttcggtttgatttagcgtaggtttggtgcgcgtagagaataattttaagcgtatcgacgttcgcgagttttttttaaatatcgaacgggatttagagttcgagtttataggcggcggtcgggggagggagtagggtgttggtcgtcgttcgggagtgttcgcgttttgggtgatttttggaaggacgtggggtttaaatttcggttggggttgggagagtagtttttagaggtttttcgcgggattttttgtcgggcgggatcgtggttttataggagaagtgggtggtaagttttgtttggcggaaagtagtcgtttttttttttttgggtttggggcggcgttttttatttttgtttttcgttttttatttttgtttttcgtcggttatattttttgttttttggattttaagcgtttcgcgcgtcgaggagtttagcgttagtggcggcggttaggagagattcgggtgttaggaaagatgggtcgtttgggggatagtagggagttcgggggaaacgtaggcgtcgggtatagagtcggtatcggcgtttttagttttgtcgaagatcgcggtcgggtttggttcgcgggaggggttttggcgtcggatttgtttcggttttgcgtgggcggtttcgtcgggttttgtaggagcgacgcgcgttaaaaggcggcgggaaggaggcggggtagagcgcgttcgggatttcgatttggacgcggttagttggagaggcggagcgtcgggaggagattttggtttcgtcgcgattcggtggttcgcgttgttttttcgcgcgtcgggttaaaaaggcgttaacgttcgcggtcgtttatttttcgcggcgtttttttttttcgcgtttatataattcgtttaggggtcgggtagttcgttttgttttttcgttcgcgtattcgttcggaggttcgcgcgttcgcgaaggggacgtagcgaaatcggggttcgcgttaggttagtcgggacggacgtcgatgttcggggttgcgacggttgtaggtaggaggtttagggtcggggggcggttcggtttcgcgggcgggggttggagcgtagcgttgggtaggtatttgggttcgtagtttcgaagttgggaggtgaggggagagcgatcggggacgagttgggataaggcgatataggggttttttcggagttggatcggtttttgggatttggcgttcgcgagaggttggagcggttagagtttagtttgcgaggagacgcgggttttgtttttagcgtcggtcgtttttggcgttaaagatagtttcgtaggggtttcgggagggttttttttttgttgttttttttttatttcgggtttcgagggtcgttgggagggtaatttcgggaagaggtcggggtgcggggcgcgggtgtaggtggaaatcgttagtaagttttttttcgttcgcgcgtttttttcgatttgtagggttgtgttaatttcgaggttttagtttttttgaggagttagggttaggtttttttttggatagggagaaggatttgggcgggggttttgatttatggagttggttattaagcggtttcgatggtttttcgagggatagttttttgtggttttgagtttgtttgtcgagggtttttggtttgttttcggagcggttttaggtagagaaagttcgtgaagaaatggttcgggtcggtttggagggagatattttacgtttttttagtttttgggtcgtttttttttgtagtttttgtttttttcggggtttggatttggggagcgatgattatttttgtttagtttgtattttggtttggacgttaggagataagtttatgtagtatgtatacgtttgttatataaataggggatagatagacgatttttaattagtaagggtgtagggaaaagtaatgtattttaaatttttgattagaggttatttgtttttaaagatgttgttatttgtttatttattgtttggatatttggaaatggtttaggtttattaatataatg

SEQ ID NO: 210 - DNA, 3077 bp, Artificial Sequence
  chemically treated genomic DNA (Homo sapiens)
tattgtgttaatgagtttgagttatttttaaatgtttagatagtgaataaatagatggtagtatttttggaagtaaatgatttttggttagaagtttggggtgtattgtttttttttgtatttttgttggttgaagatcgtttatttgttttttgtttatgtagtagacgtgtgtatattatatgggtttattttttagcgtttaggttaaaatataagttgagtaaaggtaattatcgttttttaagtttaagtttcgggaaaggtaggggttgtaggaggaggcggtttaggagttaagggggcgtgaggtgtttttttttaggtcggttcgggttatttttttacgggttttttttatttgggatcgtttcggagataggttaggagttttcgatagataaatttagagttatagggagttgtttttcgggaaattatcgaaatcgtttagtaattaattttatgggttaaggttttcgtttagatttttttttttgtttagaggggggtttggttttggttttttagggaagttgaggtttcgggattggtatagttttgtaggtcggagggagcgcgcgggcggggaggagtttgttggcgatttttatttgtattcgcgtttcgtatttcggttttttttcggggttatttttttaacggttttcggagttcggggtggagaggggatagtaggaggagggttttttcggaatttttgcggggttgtttttggcgttaaaggcggtcggcgttgagggtaggattcgcgttttttcgtaggttagattttggtcgttttagtttttcgcgagcgttaagttttaggggtcgatttaatttcgagggagtttttgtgtcgttttgttttagttcgttttcgatcgttttttttttattttttagtttcggagttgcgagtttaggtgtttgtttagcgttgcgttttagttttcgttcgcggagtcgaatcgtttttcggttttgggttttttatttgtagtcgtcgtagtttcgggtatcggcgttcgtttcggttggtttggcgcgggtttcggtttcgttgcgtttttttcgcgggcgcgcgagttttcgggcgggtgcgcgggcggggaggtagggcgggttgttcggtttttaggcgggttatatgggcgcggggaggggaggcgtcgcggggagtaggcggtcgcgggcgttagcgtttttttagttcggcgcgcgggaaggtagcgcgggttatcgagtcgcggcggggttaaggttttttttcggcgtttcgtttttttagttggtcgcgtttaagtcggggtttcgggcgcgttttgtttcgtttttttttcgtcgttttttggcgcgcgtcgtttttgtagagttcggcgaggtcgtttacgtagggtcgaagtaggttcggcgttagggtttttttcgcgggttagattcgatcgcgattttcggtagagttggggacgtcggtgtcgattttgtgttcgacgtttgcgtttttttcggattttttgttgttttttagacggtttattttttttgatattcgggttttttttggtcgtcgttattagcgttgggtttttcggcgcgcggggcgtttggaatttaaggggtaggggatgtggtcggcggggaataggggtgaggggcggggaataggggtgaggggcgtcgttttaggtttaggaggaggggaacggttgtttttcgttaagtagggtttgttatttattttttttgtggagttacggtttcgttcggtagaggatttcgcggagagtttttgggggttgtttttttaattttagtcggagtttgggttttacgtttttttaggggttatttaggacgcgaatattttcgggcggcggttagtattttgttttttttttcggtcgtcgtttgtgggttcgggttttggatttcgttcggtgtttggaaggagttcgcgggcgtcggtgcgtttggagttgttttttgcgcgtattagatttgcgttaggttaggtcgaagttttttatcggttagcgatattcgtcgtttcgttcgtttgttttttttaggttatcggggtttttagggttttcgattacgtatattaggttttggttaggggattcgatatgttgggcgagtttcgagcggtttttagtggcggcgttgtttatggtttgatgtttatggggttcgtgatttggtttcgaatcgatgttttttgtttatggtgatttttacgttttggaaagtcgcgttagtgaagttcgtggtttcgcgagcgagtcgggttggcgtagattgggttttttggtcgtagcgggttcgcgtttgacggggagggttcggttgattcgtatatttttatggtttatttattgtttgttgggcgtacggggtggggatttaaagacgaattttatgtagaggtttgggtttagttttggtaatagaaaaggtcggtatcgtcggagtaggacgcgcgcgtattattatttattcggtcggggaggttggggcgttcgcggggagtagattcgaggttgggcgttcggaggtacgagtaggattttggtcggtttttagtttttagaatttagggttaggcggggatgttagggtttgcgcgatttggggggttttagaggcgtcggcggggtttggcgcggattattagcggtttgcgggagttaggggtggagggggtcgttgtttagggaagaggatcggggttcggagtgggggtgagaacgaggtacgtttttgagtttgcgaaatttgcggatcgagcgttcgcgtaggagttcgttttttttgggtttttaggttttagattcgtacgatttttcgttcggtgttagtttagatgcgcgcgggtgatgaacgggcggtggtcgcgatttacgcgttcgttttgtttagttagcggtaaattcgttttttttttgattttagtggtattggagcgtgaggtaagggttaggcggtaggtagaggggtcggatttagtaaaagtaaataaaattttaagtaaacgaaataaatatttatatattatatatacgatataa

SEQ ID NO: 211 - DNA, 8913 bp, Artificial Sequence
  chemically treated genomic DNA (Homo sapiens)
gagttttagttaagaaaaacgatttttaagtagaaataataggcggggagaaggaagggagatatagggatttggggggtttttagggtaattggtagtgaattttgtttcgagagttttttttttatttaaaaaattaaacgcgcgagtttcgcgaaaggtttagggatagatcgtgtgggagaggattgagtagagagcgtgggggtagtgttttgtagaatttttttttttttaataataattttaaaagtttttgagtggagacgacgtaaagttaagtagtaaaggtggtttgggaggtaagcggagggtttaagtgtcgtatttttatttttagggttttttgcgtttacgggatgcgtatttttaagaagtgcgtttttcgagtaagttttgggttcgtatatatttcgggttcgtagttagaatttaatggcgataacgtttatgtaatgtaagttaaaaattaaagcgtaaaaaattattatgttatttattgaaacgttattttttgttaaattgtaattattttgttttatataagtttggttggaaagtttgtagttttagttcgggttagttaggtataggaggtcggattgtaatcggttgtttttttttcgtcgcgtttggtcgttttacgttgcgtcgtcgttgttgttttttggcgtttttgggattttatacgtatttttgaaatacgtttcgtttcggttttcggtttttttttttgtttaggggttgttttttaatagatattgatttttttagaagatttaaaaattaaattaaaatattttttattcgttttaaatatttgttttggggcgcgggggttgttaaatagagattagacgaagggagttagatttagcgaagtttttcgagtttttaaagattcgaatattaattcgcgttcgtgggtcgatggaggttttttttattttattttttggtttttttaattggttttcgttttttggttaattattgagtaattagaatggtattttcgattagggttataggtagtgttcggcggagtggttttaggagttattcgttttttgtcgggtttcgtatttaaatttttttttttattttttttttttaaattgggcgttaggatgtttcggtcggaatatacgtaggttttgggcgtttgtttaagggttttttttttttttaaattagtcgttgttttttcggtttaatcgtagaagaattagatattttttattggaaagggaaattaagtgttgttgattttaattttaggtaggcggtaatcgtttttcgtttggcgtaaattttattaagtaaataattattagtcgatcgaaatacgttcggtttataattggtgtaattttcggttatttaattgagggacgttcgtttttagtttcgatttttggaatttataaagggttatttttttttttagtgattttaagattatggttatttttttattcgatagttttagaagtaagagttagatttaagggtgtaaagtaagggtatacgtttttttgaagtttgattgagttttttttgcgtttttttgaagttttcgtttttttggagtttatttgtttttttttttaaattatttttttagattaataattttatttttatttttatcgtattcgattttgttcggatttattgtttatttgaacggattttttagtgagacgaggtttttatattggcgaaggttaagaaggggaggtggggggagggttgtgttatatcggttagttgagagcgcgtgttgggttgaagaggagggtgttttcgagagggacgttttttcggattcgtttttattttagttgcgagggcgtttttaaggagtagcgcgcgttgtttggtcgggtttgggttgttgagtgaatggagcggtcgagttttttggttttttttttttttcgcgtcgtcggttttttttatttgagttttgggaagttgagggtagttaggtagttggggtaaggagtttaaggtagcgtttatattcgggggtttttcgtaattcgatcgtttgttcgtttttttatttttcgtttttttttttatttatttatttatttatttatttatttagagtcgggacggtagtttaggcgttcgggtttcgtcgttttttcgtcgcgattttggatttttttttgttgtaggattcggtttttacgtgtgtttcggagtcggcgttttagtatacgtttcgtttcgggtttgggtgtttatagtagttagagtagtagggagttcgggattcgggcggtatttgggttaagttaggcgtcgtcgaggttagcgttgaacgtttttagggtcggaggagtcgcggggcgttcgggtttgagtcgtagtaaatgggtttcgacgtgcgggatttgaacgcgttgttgttcgtcgttttttttttgggtggcggcggcggttgtgttttgtttgtgagcggcgcggcgtagtgggcgtcggtgttggattttgcgttttcgggcgtttcggtttacgggtcgttgggcggtttcgcgtcgttatcggtttcgtcgttattttcgtcgtcgtcgttttatttttttattaaataggagtcgagttggggcggcgcggagtcgtacgaggagtagtgtttgagcgtttttattgtttattttttcggttagtttattggtatagtcggagtttgtcgttacgggtttttcggttttttttcgtttagttaggcgttattcggttaggttaggatgttttttaacgcgttttatttgtttagttgtttcgagagttagttcgttattcgtaattagggtaagtaggtcggggagcgttttttacgcgcggggtagtggcgttagggatttttcgttttaggatattttttttttttattttttttgatcgtagtttttatttagttgttttttaagggtcgtgaggatagcggaagcggcggttggggaggaggtcggagagtgggagtgtacgtaggtattggttttcgatattttttaaagttaggtagagttaggagtttgattgttcgtaagagtcgggagggcgtttggggttttttagagttcgagagatttcgggattgttagtttttacgggagtggaattaggagatcggcgtagtgtttggttttgttttggggagagttttgttaattaaggaaacgttaaattgttattaagcgtagcgttttttagacgtttggattttggattcggagtgggattagcgcgggggtgagcgtttgtgttgtgttgttttcgtagcgttaaaatgtttaggagtatttttagtttttataatacggtgttggtatatatttaggtgtatattaagtatcgtagagaattagaatgagtatatgtatttttagtaattaaatggttttttggaatagcgtcgtgttcgtggatagttttcgcgtatggtaatatagaagtggatttttattgggtttcgtttaggcggcggttacgtaggttttggggatggaagagaatttgatttattcgagtttaagttatgcgggattaggttttatcgtaggtagtggaaggaggtacgagttttggttttttttttagcgtatttggggcgtttttttattttgtaaacgcggggtttagttgggatagtatttttttaagatttggggttagaataaggatagggttattcgttgtgtttagttaggatataaggagggaattcggtatacgataagtattaggttggttttttatttcgcgtcgatgttcgtttatttttttttcgtttgggcggcgcggattcgaatttgcggagtttttgtagtttgttttttttatttatttttagtggatttttacgttattgagaatttaagttagttcggtttgattcggtaatttagtaaacgttttattaatataatggcggatgttttttttggagtaaaattattcgagggtttagggatcgggatgtttttggaatgcgtgggaagtagagtgtattttttgtaggaggtattttcgtttaaggttcgggagaagggttttgtttttgttgttcgtttttattcgcgttttttaaacgcgcgtttttaggtcgtttttattttagtttaattaggagtattcggttttcgcgaagttttggagaaatcgaaatcgttttttttttcgggagaatttgggattattgttttgtggaggaatcgtaagtagatttaagggttgtttttattttatgtttttagttagtgaaattagtgttttgtatttaaggggcgttgggataatttattggtcgttgaggtttgtgttttttgattagatcgcgttatttttgtttagtaggttggtgttatttttggggagtttttaggttttagtgttttcgtttataagaggatagttgagatgggtaatttggagattgggttcggtttgaagttatattttatagatgtagaagcgttatttattatttttttggggttttaaatatggaattcggtaatttatttaaatatttgtgattgagaaataatgaattcgagagtattgtttgtatgtgtgttatttggaggcggttgagaaattatcgaatttatgtttttggggtataaaatattattacgttattatttttttagtatttttaggggatttttgaaatttgggttttgtcgtttcgtttgggttttttgtttagttttttttagggtaggtttggtgtttgggattttattatatgtcgtggggggtgggattgtgggttttgtagttagtaggtattatatttttggaaaatatttggatttttttgtaatatataggcgtggttgttatggagaaaaagttaaaaggggattaggattagtaggtgaatgtattttttttttttattttggagaaaaagtttaatggagagagggttttagatttaagttatatagtttggaagtattatttttaggtttaagttttgttttgtagtgaaaatagatgggtttattttatttagtttttgaggtttattgggtagtttggatgtgagaagcgtttcggttgttattttggagtgggtaagggtggttttcgagattttgggtttattttttggatttttagggtttttgttgtttttttaggaatgtagggtttggtttaagatttgggttgtgagaggtaagggtattaatttttaaaaatgtggaaatggttattagagcgttaaggttaaattttaggggagaggaattaaggtcgtttttggatttttagggtagtttagttatggtgtataggtaggggtaattgttggtatttatttataatcgtttaaaattttataagtatgtttatattttaaatttttaaatattatattttgtattttaattttgtaaatattaatttagtaaatattaatcgtttatttggttaggtattgggttttgaatattaattaagataatggtttcgagaatttttgtaagaagtttattagttaattttggagaggttttttgttttggatgaggaaatttaggttttatgagattaggtggtagaggtgggatttgaatttagattatgttagggtgtttttattttttttttagggattttggttttatcgttgagatggattttttttggtttgcgggaggggtattaaatttttagtttatgtgtgggggttgacgggtttgtgagggtagatgtggggtgaggatttgagtagttttagattagatgtaaggtttaaggaggaggggaaaaaagtttgtttgggtcggacgcggtggttcgaggcggttggattatttgaggttaggagtttgagattagtttggttaatacggtgaaattttgtttttattgaaaatataaaaaaaaaaattggtcgggtttggtgacgggcgtttataattttagttattcgggaggttgaggtataagaatcgtttgaattcgggaggttgaggttgaagtgagttgagatcgcgttattgtattgtagtttgggcgatagagcgaaatttcgtttcggaaaaaaaaaaaaaaaaaagaggttgtttgttagtttattgatttcgtagtttcgtaggttcgtagaattttaaggtatgattaggtttgggattattaggttattttagggttaggtgcggaggtttgcgacgttcgagggttaaaggttttttttttcggttatataggagagggtattttgttgggggataggttttttttaattatagtgtagttgtagttatcgtttttagttttttgagtatttttttggttgagtttgttgtttattttattttttagtttttacggttcggttaggttaggcggttttcggtttttttgtagtcgtcggcgggggaggagggtatagagcgcgtttcgttttttagcgtacggttaaggttgcgtttttttttcgggtcgggattaatcgtgggaaaggcgttattttggttattcgattttttttttttaaggtttgtataaggagtttttgaatacgttgttttttttagtcggtagttttattttttttggtttttgttttcgtatttttcgcgttaggttaagcgttgggtttagggatagcgcgttttaattaaattcgtgttcgataagtttttaattaaaagagattttttttcgtttcgtaggcgtttttattattgtttttttcggggggatttgaaggagagggtttgaggtcggtttttgttcgtcgaggtttgcgtgttcggtttgggaggaggtttaggagggttcgcgggttacgggtatttttgggttcgagttttggggtgcggacggacgtttcgagagtgggtgtcgcgattcgggatttacggttttcgtcgggtacggatagttgcggagtagggttttgaggattgtgtagtgttttgggtttttgtttatttttgggtttaggaatggagaagggttcgtttagagaaaattttttcgtagtttttatttcgtttttttttttttttttttttttttttttttttttttttttttttttttttttttttttgtgtttgtttttttttttttttttttttttttagtgtttttttagaaattcggtttttatttcgggtaatagtgggtgttttgagttaaatttcgtttgtaagtttatttataggttttaaagaaggttaggttttaggttttaaaaggaagtttgtggaagtttaaacgtgttcgtttatgtaggagagttaacggggtcgggggttatttttgtttatttagtaggagagaaatggaggttttcgaggttatatgataaaagttagtggttttttaaatttttagtgtgtggtgttgagtagtgtgtgagatttaagtttggatttgtattattcgggagttaggatttgtttttttttttttttttttgtattttgttatattattttttaggtttatgtttttgttgttttagagaagttttttttttttttttttttttttttttttttttgggcggggggtggtggtgtgtgtgtatgagcgttcgtgtgtgtttcgaaaatggaggtaacgatgttttgggttttgtttatcggttgagttttgtttaagtttttggaggtattttggttaaatagtgtaagagtgggagaatgggtgttgtttgatttaatttatttttgagaattttgtgaagtttggagatttagggtagttttgggttaggaggatttgaggttgttggggtggttttgttaggattttataggagtagttttttttagttattgtgtttggattttaggttatagatttcggaatttgtagaggaatgagattttatttttgggtttcggggttaatgacgtatttttagtcgaaggatttttttttttagaggtagtaatagttttttagaagtttgtggggtataagtttaaagtaatttaataataaaaattataaaagattatgttttttaattgaggttttacgtttttttttttattttgggggggggggggaatgttaggatttttttagggggaaattgaggtaaaggatcgaagtattattatggagggaaagggagatatagtgttaggtatattttaaaggaaattggttgtttagtttggggagtgaggaagttggtttttatagtagtggttagggtcggatttttgggcgtaaggtgggttttataggggggaggaggaggagagcgtagggtcgttatttgaaggtttaattggaaggggtttttgtttttttttttattagtttttttttgggtgttatggtgttaggtcgggtagttttagatagataatattattcggtaattattttttttatttttaagattaggttatttaattggtttcgagtaattaatgaaagttggtgcgcgggtttttgatttatagttcggagttaacgcggggttagtttagtagatttatttcgtttgttcgcgttgtttttgcggaagagttgtagtttatttttggggggtgaataattttttttgtcgattaggtaacgagttttatatttaatttgttaggggttcgttgtagaagcggtagagatcgtagaagattgcggtataaataaattgggaaaaagcgaggtgggggttttagttagaaaaggatggagaagtttgttttaaggttatatttagggatttgggtcgtttttttgtcgaaagttttggaggtttgtggggttggattttttttcgttgggggttcgaatgcggggtttagcgtatatttttttcgttcgtggttggtttagatttattgtttcgttttgcgagagtatcgttgatattgtgttttttttcgtcgttttcgtagg

SEQ ID NO: 212 - DNA, 8913 bp, Artificial Sequence
  chemically treated genomic DNA (Homo sapiens)
tttgcgggagcggcggagagaagtatagtgttagcggtgttttcgtaagacggggtagtgggtttgaattagttacgggcggggggggtgtgcgttgaatttcgtattcggatttttagcggaggagaatttagttttataagtttttaggattttcggtaggaagacggtttaagtttttggatgtgattttgggataggtttttttatttttttttgattaaaatttttatttcgtttttttttaatttatttatgtcgtagttttttacggtttttgtcgtttttgtagcgaatttttggtaaattaagtataaaattcgttgtttgatcgatagagaaggttgtttattttttaaaaataaattgtagttttttcgtaggagtagcgcgggtaagcgaaatgaatttgttgggttaatttcgcgttgatttcgagttgtaaattaggggttcgcgtattaatttttattaattattcggagttagttaaatggtttggttttaaaaatgggaagagtaattatcgagtaatgttatttgtttggggttattcgatttgatattatgatatttaagggaaagttggtgagggggaaaataagggttttttttagttgggtttttagatggcgattttgcgttttttttttttttttttttatgggatttattttgcgtttaggggttcgattttgattattgttgtaggagttaatttttttattttttaggttggataattaattttttttagagtgtgtttgatattgtatttttttttttttttatggtagtgtttcggttttttgttttagtttttttttagggaaattttagtatttttttttttttttaaagtgagaaaaagagcgtggagttttagttggaaaatatagttttttataatttttgttattaaattgttttaaatttatattttataagtttttggaaagttgttgttgtttttggggaaaaggatttttcggttaaagatacgttattggtttcggaatttaaggatggggttttatttttttataagtttcggagtttgtggtttgaagtttagatataatggttaaggagagttgtttttatgggattttggtagggttattttagtagttttagatttttttggtttaggattgttttgggtttttaaattttataaaatttttaggagtaaattgggttaaatagtatttatttttttatttttgtattatttgattaaagtgtttttaaagatttaagtaggatttagtcgatgagtaggatttagggtatcgttatttttattttcgaaatatatacggacgtttatgtatatatattattatttttcgtttagaaaaaaaaaaaaagaaaaagaaaaaaaaaaagtttttttggggtaatagaggtatgagtttggagggtggtgtggtagagtgtaagggagggaaggagggggtaaattttaattttcggatagtataggtttaggtttaagttttatatattgtttagtattatatattggggatttgagaagttattagtttttattatatgatttcgagggtttttattttttttttgttaagtgggtaaagataattttcggtttcgttagtttttttgtatgggcgagtacgtttgggtttttatagatttttttttgaaatttgaggtttggttttttttgaggtttatagatgagtttataaacgaaatttggtttagggtatttattattgttcggagtgaaggtcgaatttttgaaaggatattaaaaagagagagagagaaagagagatagatatagagagagagagagagagggagggagagagagagagagagagagagagagagagagagacgaaatagaagttacgaagaagttttttttagacgaatttttttttatttttgagtttaggagtaggtagggatttagggtattgtataatttttagagttttgtttcgtaattgttcgtgttcggcgagggtcgtgggtttcgagtcgcggtatttattttcgagacgttcgttcgtattttagaattcgggtttaaggatgttcgtggttcgcgagtttttttaggtttttttttagatcggatacgtagatttcggcgggtaaagatcggttttaaatttttttttttaggttttttcgggaggggtagtggtgaaagcgtttgcggagcggagggaggttttttttaattagaagtttatcggatacgggtttgattagagcgcgttgtttttgggtttagcgtttggtttggcgcggagagtgcgggggtaggggttaggggaggtaaagttgtcggttggaaggagtagcgtgtttaaaggttttttgtataggttttggagggagagaatcgagtggttaaggtagcgttttttttacggttagtttcggttcgggaggggagcgtaattttgatcgtgcgttaagaggcgagacgcgttttgtgtttttttttttcgtcggcggttgtagagaagtcgggaatcgtttggtttggtcgggtcgtgagagttgaggggtgaaatggatagtaggtttagttaggaaggtgtttagaaggttgaaaacgatgattgtagttgtattgtgattggggaaaatttgttttttaataaaatatttttttttgtgtgatcggaagagggagtttttggttttcgggcgtcgtaggttttcgtatttgattttagggtggtttgatgattttaggtttaattatgttttagggttttgcgagtttgcggggttgcgggattagtggattagtaggtaatttttttttttttttttttttttcgagacggagtttcgttttgtcgtttaggttgtagtgtagtggcgcgattttagtttattttaattttagtttttcgggtttaaacgatttttgtgttttagtttttcgagtagttgggattataggcgttcgttattaagttcggttaatttttttttttgtatttttagtagagatagggttttatcgtgttggttaggttggttttaaatttttgattttaggtgatttaatcgtttcgagttatcgcgttcggtttaagtaagtttttttttttttttttttaagttttgtatttagtttggggttatttaagtttttattttatatttgtttttataaattcgttaatttttatatatggattaagagtttggtgtttttttcgtaggttagaagaaatttattttaacggtggggttaagatttttggaaaaggagtagaaatattttagtatggtttgggtttaaattttatttttgttatttaattttatagaatttggatttttttatttaaaataaggggtttttttaggattagttggtgagttttttgtaaaggttttcgaggttattgttttaattaatatttagaatttagtgtttgattaagtaggcgattgatgtttgttaaattaatgtttataagattaggatgtaagatataatatttaagaatttaaaatatgaatatgtttgtgaagttttgggcggttgtgagtgggtattaataattgtttttgtttgtgtattatggttagattgttttagggatttagagacggttttgattttttttttttggggtttggttttggcgttttgatggttatttttatatttttgagagttgatgtttttgttttttatagtttaagttttgggttaggttttgtatttttggggaagtagtaggaattttggaaatttaaagaataaatttagaatttcgagggttatttttgtttattttaggatagtagtcggagcgttttttatatttaagttgtttaatgagttttaagggttgggtaagatggatttatttgtttttattgtaagataaaatttaaatttggagatggtgtttttaggttatatgatttgaatttagggttttttttttattgggttttttttttagggtggagaagaaggatatatttatttattagttttggtttttttttaattttttttttatggtagttacgtttgtatattatagaagaatttagatattttttagaagtgtaatgtttgttggttgtaaaatttatagttttattttttacgatatgtgataagattttaggtattagatttgttttgaaaagggttggataagggatttaaacgaagcgatagaatttaggttttaaaaattttttagaagtattaaaaagataatggcgtagtagtattttgtgttttaggggtatggattcgatggttttttaatcgtttttaaatagtatatatgtagatagtgttttcggatttattgttttttagttatagatgtttagatgggttgtcgagttttatatttaaagttttaagagggtggtgggtagcgtttttgtatttatggagtataattttaagtcggatttaatttttaggttgtttattttagttgtttttttatagacggggatattgagatttagaaattttttaaaagtaatattagtttgttaaataaaggtggcgcgatttgattaaagaatataagttttagcgattagtaagttgttttaacgttttttgagtataaaatattaattttattaattaaaagtatagagtggaggtaatttttgggtttgtttgcggtttttttataggatagtgattttagattttttcgaagaaaagggcggtttcgatttttttaaggtttcgcgggggtcgggtgtttttggttaggttaaggtaggagcggtttgaagacgcgcgtttagaaggcgcgggtgaaggcgggtaataagggtagagtttttttttcgagttttgggcgaaggtattttttgtaaaagatatattttgttttttacgtattttaaaaatatttcggtttttaggttttcgagtaattttgttttaggaaaagtattcgttattgtattagtaaagcgtttattaaattatcgaattaaatcgaattggtttaggtttttaatagcgtggaaatttattgaaaataaatgaagagggtaaattataggggtttcgtaggttcgggttcgcgtcgtttaggcgaaagagaggtgggcgggtatcggcgcgggatgagaaattaatttgatatttatcgtgtgtcgagttttttttttgtattttgattaagtatagcgaataattttgtttttgttttaattttaggttttgaagaaatattgttttagttgagtttcgcgtttataagatgaagaggcgttttagatgcgttgaaagaaaggttaaagttcgtgtttttttttattgtttgcggtagaatttggtttcgtatagtttggattcggataagttaagtttttttttatttttagaatttgcgtggtcgtcgtttgagcgaagtttagtgaagatttatttttgtattattatacgcgggagttatttacggatacgacgttgttttagaaagttatttagttattggaggtgtatgtgtttattttagttttttacgatatttaatgtgtatttaagtgtgtgttaatatcgtattataagggttggaggtgtttttggatattttagcgttgcggaggtagtatagtataggcgtttattttcgcgttggttttatttcgaatttagagtttagacgtttgaaaagcgttacgtttggtgataatttggcgtttttttaattaataaaattttttttaaggtagagttagatattgcgtcggttttttggttttattttcgtggggattagtagtttcggaatttttcggattttaaggggttttagacgttttttcggtttttgcgaatagttaggtttttagttttgtttggttttggaggatgtcgggggttagtgtttgcgtgtatttttatttttcggttttttttttagtcgtcgttttcgttatttttacggtttttgggaagtagttgggtaagagttgcggttaaaaggggtaggagaggggggtgttttagagcggagagtttttggcgttattgtttcgcgcgtagggggcgtttttcggtttatttattttgattgcgaatagcgggttggttttcgaggtagttgggtaggtagggcgcgttaggaaatattttggtttggtcggatgacgtttggttgggcggaggaggatcgaagggttcgtagcgataggtttcggttgtgttagtgaattggtcggaaaagtggatagtgaaggcgtttaggtattgtttttcgtgcggtttcgcgtcgttttagttcggtttttgtttgatgaaggagtgaggcggcggcggcgggggtggcggcggagtcggtggcggcgcggggtcgtttaacgattcgtaagtcgaagcgttcgggggcgtaaagtttagtatcggcgtttattgcgtcgcgtcgtttataggtagggtatagtcgtcgtcgttatttagggaggggacggcgggtagtagcgcgtttaggtttcgtacgtcggagtttatttgttgcggtttagattcggacgtttcgcggttttttcggttttggagacgtttagcgttggtttcggcggcgtttaatttggtttagatgtcgttcgggtttcggattttttgttgttttggttgttgtaggtatttaggttcggagcggagcgtgtgttgagacgtcggtttcgggatatacgtggaagtcgggttttgtagtaagaggaagtttaggatcgcggcgaggagacggcggggttcgggcgtttgggttgtcgtttcggttttgggtgggtgggtgggtgaatgagtaggtgggagggagggcgggaagtgggggagcggataggcggtcgggttgcggagagttttcgggtgtgggcgttgttttgaattttttattttagttgtttggttgtttttagttttttaaagtttaaataagaggggtcggcggcgcggggaagaggaggagttaggaggttcggtcgttttatttatttagtagtttaagttcggttaggtagcgcgcgttgttttttgggggcgttttcgtagttggggtgagggcgggttcgagggagcgtttttttcggagatatttttttttttaatttaatacgcgtttttagttggtcggtgtggtataattttttttttattttttttttttggttttcgttagtgtgggagtttcgttttattggagagttcgtttaggtaagtagtgagttcgggtagggtcgaatgcggtgggagtagagatggggttgttaatttaaaagagtggtttggagggaggggtaggtaggttttaagagggcgggaattttaggaaagcgtagaaagaatttagttaagttttaaagaagcgtatatttttgttttgtatttttgagtttggtttttgtttttagaattgtcgggtaggggagtggttatgattttggggttattggggaaagaggtggttttttgtgggttttagaggtcgggattgaaagcgaacgttttttagttgggtggtcgggagttgtattagttataagtcgggcgtatttcgatcggttagtagttgtttatttggtgaggtttgcgttaggcggaaggcggttgtcgtttatttaaaattggagttagtagtatttagtttttttttttagtgaggaatatttaatttttttacggttaagtcgggaaaatagcggttagtttaggagggaagaaaatttttgggtaaacgtttaaagtttgcgtatatttcggtcggagtattttggcgtttagtttggggaggaggggtgaaggggagggtttggatacgaagttcggtagggagcgggtaatttttggagttatttcgtcgagtattgtttgtggttttggtcgaggatattattttggttgtttagtgattgattaggaggcggaagttagttaaggggattaaggagtggagtagggagaatttttatcggtttacgggcgcgagttagtgttcgaatttttgggagttcgaagagtttcgttaaatttgatttttttcgtttagtttttgtttggtagttttcgcgttttagagtaggtgtttggggcgggtagggggtgttttggtttggtttttggattttttaaaggagttagtatttattgggaaataatttttaggtaaggagaagaatcgggggtcggagcggagcgtgttttagaggtgcgtataaaattttaggggcgttaggaggtagtagcgacggcgtagcgtgggacggttaggcgcgacgggagggaagtaatcggttgtagttcggttttttgtatttggttggttcgggttggggttgtaagttttttagttaaatttatgtgaagtaaagtagttgtagtttgataaagaatggcgttttaataaatgatatagtaattttttacgttttggtttttagtttgtattgtataaacgttgtcgttattaaattttggttgcggattcgaagtgtgtgcgggtttaggatttattcgaagggcgtattttttgggaatgcgtatttcgtaggcgtaggagattttgagggtaaagatgcggtatttgagtttttcgtttgttttttaggttatttttgttgtttgattttgcgtcgtttttatttagaagtttttaaaattattattaagaaaagaaagattttataagatattgtttttacgttttttgtttagtttttttttatacgatttatttttaaatttttcgcggggttcgcgcgtttggttttttgagtggagaaaggattttcgagataaaatttattgttagttgttttaagaattttttagatttttgtatttttttttttttttttcgtttattatttttatttggaagtcgttttttttaattaggattt

SEQ ID NO: 213 - DNA, 2501 bp, Artificial Sequence
  chemically treated genomic DNA (Homo sapiens)
gtaaaaggtttttgtaaagatgaaggtttttatatttgtgagggaaataataataataaaggtgtttggaagggttgtttattcgtatttatgggtttttttttagaattttgggaatttttttttttagagttttgtaggcgtttagggttagggttggaaaggtttttataaatgttaatttgtgagtattttatgggttgttttttgatttttagtatttttttttttaattagatttaatggtgaggtgaagaggtgggggcgatggagaatggtatttttagtttggagaaaaaagtagggagaggcggggaagtttttttattttaattttagggttaggtttttttttttttaaataagtttaaggaatgttttttaaggtaaaattttattttattgtgtatttggttgtgaagggggttgtttaggagattagggttgtttttggagagtttggagggtaggggtaataatgtttgattttttgtaaataaatatatttgtaagaaaagttagattagagtgaagtaaagttaggatttgatggtggcgggaagggaaggggttaatgttgttgttggatagaggggtgttattttttttagaagaatagtatgtcgtggttattattataataatagttgatataattattatgggttggggatttataagagtttttataatttttaggtaggaggtattacgaattttattttataattgaggaaattgaggtataaagaaacgaagtagtgatagtagtttttttttttttttttaatagtttggaattaagttgtttgagtcgaggttgggttttaggaggtgtggatagtatttttatttcggtaaattagattcgtttgtttataattggggagaatggtggttttgaaaaggttaatttgggagttttggggacggttgtagggaacgtacgtttattttttttaggaagtagagttaggtcgttttttttttcgtagtggtgaggacgcgtggatagtttcgcgggggcggcgggagatttgcggagtggtcgtattttaggttcgcgttaaggtcgggtagtttcgttttttgtttagttttcgcgaggtgtcgttttcggtcgaagaaattatcgcggcgttattttcgtagttcgtatttatttatttatttatttttaaataaggggggcgtttttttttttttaatttgaaattggaaatatttagaggttttgtttttaagggggcgcgttttttttttgttattttgtattttcggattagttttttttcgtaattatataggagtaatttttttgtaaggttttgtttaacgttggtttcgcgtttagttgtataatacgtagttaaagcgggggttgggttagaagtatcggttttttttttttaatatatattttcggagtttttcgtaattttttttttttttaatgataagtaattgttaggttcgtagggtgggtgttgtattgtatcgtttcgcgcgtagttggtttttagagtgtagtcggtgtaagttcgggggtttaaaagggcgggaggagtatattttgggttttttagttttgtagttttttttttgtaaagaaaagtaagtggtttttggcgcgaaagttttggcgttttttttgatttttatggaaattaggagggcggggtaaagtcgtttttttttttttttttttttttttttgtttgcgttatagttttttttttttttcgtttttcgggtgtgttagattttttagttaataatatttttcgagttttaaagcgtaggttgtgatagttatttgtttggacgcgttgggtggatgcggggggtttttgggaattgtgttggagtcgagtaagcgttagttaggcgtaagcgcgtatagattgtagttattcgaggatattttcgttttttcggtttattcggagatattcgcgtagaatcgttttcggattttttgtagtcggcgggaggtaaggagtagggtttgtaaatcgttcggcgtttagggaagcgacgagcgtcggggtaaggtaagttttggacgggattgcgacgtgcgtatcgggcgttttaatatgttcgggggattgtttttgttttcgaaataaaattatttttgggtttttttagaaaagttagttttagtttcgaaggtattttggttagaggagattcgttttaatttttttgtagtttttatcggggggagtaatggtttttgcgaaaagaaattttttcggttttagaagatttgtttgtgtttgagttgtcggagagtcggtgcgtttttattttaggttggggtttttttttaaagggtgtttttggaggaagaagagggggggattaggtagggcgaggtcgtcgcggtcgtaatttgggttacggttgttttagtttggaggagaggcggttttttcggcgatttttttcgcgcgggcgtttttgttattttcgggaataggggtttagttttt

SEQ ID NO: 214 - DNA, 2501 bp, Artificial Sequence
  chemically treated genomic DNA (Homo sapiens)
agaggttgagtttttgttttcgggaatggtaggggcgttcgcgcgaggagggtcgtcgggagagtcgttttttttttaagttggagtagtcgtgatttagattgcgatcgcggcggtttcgttttgtttaattttttttttttttttttttaggggtattttttggagaagaattttagtttggggtggggacgtatcggtttttcgatagtttaaatatagatagattttttagagtcgagggaattttttttcgtagaagttattatttttttcggtaagggttgtaaaaggattagggcgggttttttttagttaggatgttttcggggttggaattggtttttttgggaaaatttagagatggttttgtttcggaagtagaaatagtttttcgggtatattagggcgttcggtgcgtacgtcgtaatttcgtttagggtttgttttgtttcggcgttcgtcgtttttttgggcgtcgggcggtttgtaagttttgttttttatttttcgtcgattgtaggggattcggaggcgattttgcgcgggtgttttcgggtgggtcgggggggcgggggtgttttcggatggttatagtttgtgcgcgtttgcgtttggttagcgtttgttcggttttaatatagtttttaggagtttttcgtatttatttagcgcgtttagatagatgattgttatagtttgcgttttgaagttcgggggatattattaattgaaaaatttgatatattcggggggcggggagagaagggggttgtggcgtagataagggggagggagaaaggagaggaaagcggttttatttcgtttttttgatttttataaaaattaggggaggcgttaaggttttcgcgttaaaagttatttgtttttttttgtagagagaaggttgtaaagttgggaagtttagggtgtgtttttttcgtttttttggattttcgggtttgtatcggttgtattttgagaattagttgcgcgcggagcggtgtaatgtagtatttattttgcgagtttggtaattgtttgttattaaaagaaaaaaaaattacggagggtttcgggggtgtgtgttggggaggggagatcgatgtttttaatttagttttcgttttgattgcgtgttgtgtagttgagcgcgaggttaacgttgagtaaggttttgtagggaggttgtttttgtgtaattacgaaagaaggttagttcgaaggtgtaaaatagtagggagaggacgcgtttttttaggaataagatttttggatgtttttagttttaaattgaaagaagaggggcgttttttttgtttgaaaataaataaataaataagtgcgagttacgagggtggcgtcgcggtggttttttcggtcgaaggcgatatttcgcggagattgagtagaaagcggagttgttcggttttggcgcggatttggagtgcggttatttcgtaggtttttcgtcgttttcgcgggattgtttacgcgtttttattattgcggaggaggaggcggtttggttttgttttttagggggaatgggcgtacgttttttgtagtcgtttttagggtttttaagttaatttttttaaagttattattttttttagttatgggtaggcgaatttgatttatcgagatggaagtgttgtttatattttttgagatttagtttcggtttaaatagtttgattttaaattgttgaagggaaaaaggaaagttgttgttattatttcgtttttttgtgttttagtttttttaattgtgaaatggagttcgtagtgttttttatttgagagttatgaaagtttttataagtttttagtttataatagttgtgttagttattattatgatgatgattacgatatgttatttttttggggaaaataatatttttttgtttagtagtagtattggtttttttttttttcgttattattaaattttggttttattttattttggtttagttttttttataggtgtatttgtttgtagggggttagatattattgtttttgttttttaaattttttaaaaataattttgattttttggatagttttttttataattaaatatatagtgaggtgggattttgttttgaaaaatattttttaggtttgtttggagagaggggaatttggttttgggattggggtgggaaggttttttcgtttttttttatttttttttttaaattggaaatgttattttttatcgtttttatttttttattttattattggatttagttaaggaggaggatgttgagggttagggggtaatttataaaatgtttatagattagtatttgtgaaggtttttttagttttgattttggacgtttatagagttttagggagaaagatttttagagttttaggaagaggtttatgaatgcggatgagtagtttttttaagtatttttattattgttattttttttataaatgtaaaagtttttatttttgtaaaagttttttat

SEQ ID NO: 215 - DNA, 2501 bp, Artificial Sequence
  chemically treated genomic DNA (Homo sapiens)
tggagtgtaatggcgtaatttcggtttattgtgagtttcgtttttcgggtttacgttatttttttgttttagttttttgagtagttgggattataggtgtttattacgatattcggttaatttttttgtatttttagtagagatggggttttatcgtgttagttaggatggtttcgattttttgattttgtgatttgttcgttttagttttttaaagtgttgggattataggcgtgagttattgtgttttgtttaaggttggtttttgttatttgtaattaataatttagattagtatagtaattattttagatatttgtggattagagaaaagttattaaaggataatttaatgtttgtgttttggggttgtaattaaatttggaatttttttgatttgtgtttttcgtttagtataaagtagggtatataagttgttttagtgaaatttggttagttgagttttttagtaagttagttagtttataaatgtttgttagaagttgttttaggtgtagaaattataaagtaagtaggagtaggtttttgtttttaagatgttttatatgtagtatagatttaacgtatttaaaacggaaggttgttattttttttgtttttttaatttatataataatatatattcgtgttttatgttttaattatattgaattgtttgttttttttattttcgtttgttaatagtgagtagtttggtgtttttagattataggggtgggagggaaagagagagatagtagataattaggttggggtagatagatattagattttgatgttaggtggaggaatttagatgtattggttgttgttttaagttatttttttttggtttaaattttagattggtcgtatagtttaatttttttttttttattaaaggttatttgtgtagaagatgatataaagggggatttagtacggtgattcgtgtttgtaatttttgtattttcggaggttaaggagggaggattatttgagtttaggagttcgaggttgtagcgagttatgatcgagttattgtattttagttttgacgttgagtgagattttgttttttaataaaatatatttaaaatttaaaaagaagattatataaaggggttatttattattttggttagtaatgtagggtaaaatttgaaataatttggttttgtagtattttttagatgttaaatttttattttttattgtatagtttttatagtgttttgtgtgagatgagagggagtatggcgggttttagttggttttgttttgggaaaaattttttatttttgtatcgtttttttaaagcgggggttaagttagcgtcgtttgtttttttatttagattagattttttttttagatgtttttatttttttgaagttttataataattttgtgaggtaagtattattatttttttattttatagatgaaattgaagtttaggaaggttacgtttcgggttttaaatttcggaattttcgtttcgatgttatttaggtttgggttattgagtttaagaaacgggtcgacgggtgattagacggacgtcgggattagtttaagtttagggttgagggtcgttaggtggcgcgtttttttttttttatttttcgcggcggttcgggcgtatttgaatttagcggggtgcgtcggggaaagtaggcgcgtagggtggggcggggagtagttttaattttttagttcggagtgggtaaggagtacggtttagtttagtcggttggtatcgttaagcggtcgtcgggtcgtattagttttttttttgtttgcgttttttagcgtgtaatttatttggggggttatcggggattgaacggagcgggcgagcgttgttaggaggtggggtcggttttatttgtcgattgttcgtagtaggtagggagagggcggggtttgttttatagggttcgttttttagtttttgggtttcgggcgcgcgacgagatataaggtagttaggaaataatgcgtttgtagttcgcgttttcgcgtcgatttcgagagcgttcgggtcgtcgtgcgcgagcgagggagggcgcgcgcgcggggggggcgcgtttgtgagtgcgggtcgcgttttcggcggcgcgtatgtgcgtgtgtgttggttgtcgggttgtttcgagtcggcggggagtcggttcgttttaggtggcgggcggttggagcgaggtgaggttgcgggtggttagggtacgggcgcgggtttcgcggtgcgggttggttgtaggttgttttttgggtacggcgcgttttcgttcggtttcgtcgggttttgggagttgcgtttcgggcggcgttggtaaagtttgttttgaattcgttgtttatagtcgggttcgcgcgttgcgattggttttttttattattttgattcggggttcggtttttcgggacgcgaggattgggcgtaggttgtaagttggtggggttggggaggaacgagagttcggtagtcgattgtg

SEQ ID NO: 216 - DNA, 2501 bp, Artificial Sequence
  chemically treated genomic DNA (Homo sapiens)
tatagtcggttgtcgggttttcgtttttttttaattttattagtttgtagtttgcgtttagttttcgcgtttcgggaagtcgggtttcgggttagagtggtaggggaagttaatcgtagcgcgcggattcgattgtgggtagcgagtttaaagtaaattttgttagcgtcgttcggagcgtagtttttagggttcggcggggtcgggcgggggcgcgtcgtgtttagaaggtagtttgtagttagttcgtatcgcgggattcgcgttcgtgttttggttattcgtagttttatttcgttttagtcgttcgttatttggagcggatcggtttttcgtcggttcggggtagttcggtagttagtatatacgtatatgcgcgtcgtcgagagcgcggttcgtatttataagcgcgtttttttcgcgcgcgcgttttttttcgttcgcgtacggcggttcggacgttttcgggatcggcgcgggagcgcgagttgtaggcgtattgttttttgattgttttatatttcgtcgcgcgttcgggatttagggattggggggcgggttttatgggataaatttcgttttttttttgtttattacgggtagtcgataggtggggtcggttttattttttggtagcgttcgttcgtttcgtttaattttcggtagttttttaaataaattgtacgttggggagcgtaaataggaggagggttgatgcggttcggcggtcgtttggcggtgttagtcggttgagttaaatcgtgttttttgtttatttcgagttggggaattagggttatttttcgttttattttgcgcgtttatttttttcggcgtatttcgttgggtttaggtgcgttcgagtcgtcgcgaggggtagggggagggaaacgcgttatttggcggtttttagttttgaatttgggttggtttcggcgttcgtttggttattcgtcggttcgttttttgagtttagtggtttaagtttggatggtatcgaagcgaagatttcgggatttagagttcgaaacgtaatttttttgagttttagttttatttgtaaaatgaagggatggtaatgtttattttatagggttgttgtgaggttttagggaaataagagtatttagggaaggggtttggtttaggtggagaggtagacggcgttggtttagttttcgttttggggaggcggtgtagaaatgaggaattttttttagggtaaagttagttgagattcgttatgtttttttttattttatataaaatattgtaggagttgtatagtagagaatgaggatttggtatttggaaaatattgtaggattaagttgttttaagttttgttttgtattgttggttaagatgatagataatttttttgtataattttttttttaaattttaaatatattttgttaagagatagggttttatttagcgttaaggttggagtgtagtggttcgattatgattcgttgtagtttcgaatttttgggtttaaatgattttttttttttagttttcgaaagtgtagggattataggtacgggttatcgtgttgggtttttttttgtgttattttttatatagatgatttttggtggaagagaaaaaattaaattatacggttagtttgagatttaggttagaggagagtaatttgggatagtagttaatatatttagatttttttatttggtattaaggtttggtgtttgtttattttagtttgattgtttgttgttttttttttttttttttatttttgtggtttaagaatattaaattatttattgttggtagacggaagtgagaagggtaagtaatttagtgtggttggagtatgggatacggatgtgtgttgttatatgggttgggaaggtagggaaaatgatagtttttcgttttagatacgttgggtttgtgttgtatgtgggatattttgaaggtagaaatttgtttttatttgttttgtgatttttgtatttagaatagtttttggtagatatttgtgaattaattgatttattgagggatttagttaattagattttattgagatagtttgtgtgttttgttttgtgttaaacggaagatataaattagaagggttttaggtttggttgtagttttaaggtataggtattggattgttttttagtgatttttttttggtttatagatgtttgagatggttgttgtattagtttgggttattggttataaataataaaaattaattttaggtagggtatagtggtttacgtttgtaattttagtattttgggaggttgaggcgggtagattataaggttaggagatcgagattattttggttaatacggtgaaattttatttttattaaaaatataagaaaattagtcgggtgtcgtggtgggtatttgtagttttagttatttaggaggttgaggtaggagaatggcgtgaattcgggaggcggagtttatagtgagtcgagattgcgttattgtatttta

SEQ ID NO: 217 - DNA, 2501 bp, Artificial Sequence
  chemically treated genomic DNA (Homo sapiens)
gttaaggtgggtggatcgtttgaggttaggagttcgagattagtttggttaatatggtgaaattttgtttttattaaaaatataaaaattaggtacgtgtgatggtgtatgtttgtaattttagttattcgggaggttgaggtaggagaatcgtttgaattcgggaggtgaaggttgtagtgagttgaaattttgttattgtatcgtagtttgggcgataagagtaaaattttatttgaaaaaaaaaaaaaggaaagaaagaaggaaagagaaggaaagaaagaaggaaagagaaaggaaggaaagaaagaaagaggaaaaaaggaaaggaaaaggaaaaagaaaagaaagaaaaggaaggaaagggagaaatgggatgtttgttaggtgtagcgttttggggaggcgtggagagtttataatagggattaaggtgttttttagtcgtagaatatggattatttgttaggtgtggttttggtatatttaggttattggttttgtcgatttgttaaatttaattatttgggtattttttcggttaatatagaggatgtttttatgtgaatacgtgtttatttgtgaaatgtttataatgttaaaggttcgttttggggtaaatatttgatagcgtttggtaaatttaataaatgttttttttgtaatgagtaagttttttaatgtttaaagaaatagttgaattcgttagtaatatgtcggatgttttttttatgtttgtatattttttcgttagtttttttttttttttttttttgagacggagtttcgtttttgttgtttaggttagagtgtaatggtgttatttcgttttatcgtaatttttatttttcgggtttaagcgagttttttgttttaacgttttgagtagttgggattataggtatgtgttattacgtttggttaattttgtatttttagtagagacggggtttttttatgttggttaggttggtttcgaattttcgattttaggtgattcgttcgtttcggttttttaaagtgttgggattatcggcgtgagttatcgcgttcggttcgttagttttaatatttatgttttttggagggtgaagggtttgaaaggtattaaaaattttggtttttaggagcgagttaaatttttttttttagagattgaaggaggttattcgatttcgtttttaggaaaatttaattcgtaatttttttttcgttttggtttttttaggttttattattcgcgtcggggagacgcggttcggtttacgttaggtcggtaagaatttattaggttttaggagggcggggtcgagttttagaagtcggggttcgggttaggagttttggtgtaggcggattcgggcgcgtgttatgggattataattttcggtacgtatcgcggattgcgtcgaatacggttggttgggagatttaattttattgtttttatcggttaatgggacggaggaaagaggtttgattcggattttcggaggttaatggtaatatagaggaggcgggtgtttttttattatttattttgcgtttagagaagttatatttaaaaggtcgtgtcgggtcgggttttcgtaggtagtgggattagagtcgggaggggcggcggtgtttcgggaaagcggtttttggggtattcgggttttttcgaggcgggtttcggacgtcgtcgtgggcggggtcgagggcggggtttggtttcgttgtggagcggttcgtaatttattatggcggtcgcggggtttggtgtttgtgtttgagtagcgttggagtcggagtcggttttcgggttttgcggttgaggagttttttcgttgtttacggtttttatcggcggggggcggttgggtttttcggcggagttcgggagatgtgattgtttgagggcggtggtggtgttagcgttcggggtcgggggagggggtgtttcgggtagagattttcgggtttggggtagttgaggcggtcgggttttttttatacggggttcgtttttcgttgtttgggtcgcgagagtttttcgttttttatagtttcgtttcggttttgggatattgcgggtggtttgttttttttagtttgggatatttcgttttttgaggcgtggaagagcgtcgtttcggagtaagttgttcgtgtcgcgtttcgatagttttttttagttttaagtcgttttttatttcggatttcggttttaattttggttacggagttttttatttaaattttttttttgttgttaaggggttttttttttttttaaggtggttttcgcgagtttttaatgttttgattttttttaatgttatttacggtttttttagttttagtttagttaaaaattttaatgtaaaggaaaagtttggattggttttataggttttttaaaaagcggatttaaaagttgttggtaatgtattttttttcgttagagtcgagggtaaattcgttgaaatttgggtgattcgtgttttttttcggagagt

SEQ ID NO: 218 - DNA, 2501 bp, Artificial Sequence
  chemically treated genomic DNA (Homo sapiens)
gtttttcggaaaaggatacgggttatttagattttagcgagtttgttttcgattttgacgaaaaggaatgtattgttagtaatttttaagttcgttttttaaaaggtttgtggaattaatttagattttttttttgtattaaagtttttggttgagttgagattaagggggtcgtaggtgatattggaagaagttagggtattagaggttcgcgggagttattttgggggaaggggagattttttgatagtaagggagggatttgaatgggaggtttcgtggttaaagttggggtcgggattcggaataaggggcggtttggggttgagggaagttgtcggggcgcggtacgggtagtttatttcggggcgacgtttttttacgttttagaaaacggggtgttttaagttgggggaaatagattattcgtagtgttttaaagtcggggcggggttgtaagggacgaaggattttcgcggtttagatagcggaaggcgggtttcgtgtagaggaggttcggtcgttttagttgttttaagttcgggggtttttgttcgagatattttttttttcggtttcggacgttgatattattatcgtttttaggtagttatatttttcgagtttcgtcgagggatttagtcgtttttcgtcggtaggggtcgtggatagcggaggggttttttagtcgtaggattcgggaatcggtttcggttttagcgttgtttaggtatagatattaaatttcgcggtcgttatgatggattacgagtcgttttataacgaggttaggtttcgttttcggtttcgtttacggcgacgttcggagttcgtttcgaggggattcggatgttttaagagtcgttttttcgggatatcgtcgtttttttcggttttggttttattgtttgcgaaagttcggttcggtacgattttttaaatgtggtttttttgagcgtaaggtgagtggtaaggaagtattcgttttttttgtattgttattggttttcgagaattcgggttaggtttttttttttcgttttattggtcggtgggagtagtagggttggattttttagttaatcgtgttcggcgtagttcgcggtgcgtgtcgggagttgtggttttatggtacgcgttcgagttcgtttgtattaagatttttggttcgggtttcgatttttggggttcggtttcgtttttttgggatttggtagatttttgtcggtttagcgtaggtcggatcgcgttttttcggcgcgagtagtgagatttggaagagttaaagcgagggaaaaattgcggattggatttttttggaagcggagtcggataattttttttagtttttaagggagaaaatttggttcgtttttagaaattaaggtttttgatgttttttaagttttttattttttaaaaagtataaatattagaattagcgggtcgggcgcggtggtttacgtcggtaattttagtattttgggaggtcgagacgggcggattatttgaggtcgggagttcgagattagtttgattaatatggagaaatttcgtttttattaaaaatataaaattagttaagcgtggtggtatatgtttgtaattttagttatttaggacgttgaggtaggagattcgtttgaattcgggaggtagaggttgcggtgaggcgagatggtattattgtattttagtttgggtaataagagcgaaatttcgttttaaaaagaaaaaaaaaaaaaaattagcgaagaaatatatagatatagggaaaatattcgatatgttgttaacgaatttaattgtttttttgggtattaggaggtttatttattatagaaaaggtatttgttgggtttgttaggcgttattagatgtttgttttagaacgaatttttaatattataaatattttataggtggatacgtgtttatatgaaaatattttttatattagtcgagaaaatgtttagatggttgggtttagtaagtcggtagaattaatgatttagatgtgttaaagttatatttaataaataatttatgttttgcgattaaaaagtattttggtttttattataggttttttacgtttttttagagcgttgtatttgataggtattttatttttttttttttttttttttttttttttttttttttttttttttttttttttttttttttttttttttttttttttttttttttttttttttttttttttttttttttttttttttttttttttttttttttttagatggagttttgtttttgtcgtttaggttgcgatgtagtaataggattttagtttattgtaatttttatttttcggatttaagcgatttttttgttttagtttttcgagtagttgggattataggtatatattattatacgtgtttaatttttgtatttttagtagagatagggttttattatgttggttaggttggtttcgaatttttgattttaagcgatttatttattttggt

SEQ ID NO: 219 - DNA, 2501 bp, Artificial Sequence
  chemically treated genomic DNA (Homo sapiens)
tttttgtgtgtggaatatattttttatatagttatattatttaaaatttattgtttttaagtttttatttaaatgttttttcgtgaagttatttttgagttttttttaaaattgtagttttttatttttgtattttttattgttttttatttttaatttttgttattgtagttagaattatttgatatatagtttttattttattggttttttgttatgtttttttttataagaatttgaagtttattaggtcgggagttttgtttgttgtgtttgttgttattttttagtgtttaaaattgtttggtatatagtaggtatttaataatttttgaattagtgaaaattagatggtggtttggtatttttatataggaatgagttaggtggaaattatttaggatataagtagattttgaagtgataaggaagggttattataattatgtggggtttattttgtttttttttgttttttttttttaggtttagtaatagttttattaaggattttatgaatattaaagtttatatttatatgttgttagaggtgagagtagtttattttattattagattttgtgtttagggtggtgatttgaagaaggaagagagcgaaagaagggaaggattatttttttttttaaattggagttaagggagggaggttagagtaagtttgggggcgtaatttagatttagtttttgtttaattttttttgtttttttttttaggggtttagagaattataaggtttgtagaattttttagagaagttttattattgattttttttttttatttttagatattaaagagtttgaatgtttttgagttatatggtttttttttttttttataaattttgttagttgttacgggggtttgtttttagggtataaagttattgagagatttagagatttagtttttttgtggaatttttaaaatgttttagtagttttgtttttagtttgttgtttggtagtatttgttagttgattttatgtattgtttttttttttgttattttggtaatttgggttttttattttatttttttttttatttttttttttagacgttattttttgaattgttatagagaatgggttaatttatggtggaggtttgtttatttttataataattaaagggttttaaggtttacgtttttatatatttaattattttttaggtattttaaattatatttaaattttaatttagttttattttgttttagtttttgtttgtaagtgttttagtttttaatgggtatagatttggatttcgttttttttagtcgggtttttattttaggttgagtttagttatcgttaattaatgtagagttaggttttttttttttttaattttggtcgtagtttaattttgttttttgaaagtatttcgtttttgttatttaatgttttttcgtgtgtttgatagttattttgtttttttattttcgttgtgttttaaattcgtttttatttagttttatggttttgtttaatcgtagagttgttttgttcgtttacgcggagtttagttcgatttattttcgtcggttgttacgtttatttttatataagttttgttttcgttgagtagtatggcgtgcgatatcgtttttttggtgttttggtaggggtttagaagtttttcgttcgttaattagagaaaaatagggttatttattttcgtttttgggggttgttttttattaattttatgtaagttaattagtgtgaggtagattttcgttttttcgatataggtttcgagtttttttagttgtttatagttcgttagtttttgagttaatcggcgtggagtatcgtgaaggtcgaacgcgttttttcgggattttaggggtcgtgagcgttttattatttttttttacgttaattacggtatagttttgtagggaagggttcgttttttaatttttcgaggttttgcggtcgattaatagcgttttggttaattagcgagcggcgggatattgggtttttttttttcgggtttacgtgagttgtagggaaacgtaggggcggtttttaggtgttgtcgtcgttatcgttattattatttttatcgtcgtttcggaatttaggtttggggggcggtggggtcgcgtatggagttttcgtttttcggagttgttaatattgttaacgttatcgttacgttatatataggtgagttttgggtttggagggtggagggtttagttcgtgattttacgtatttttttcgttttcgcgtagaggatgtggtttggtcggtggtttgttggtgttcgatttttcgtcgttattattacggttggtggatttgcgtgtggtattgtttaagtttttcgttttttatagtggatttgatcgtggtttaatttttttttttcgttgtataatggatcggtttgcgtgtttatgtttttttttacgttaatttagggtggattcgtttataggttttttttttattttta

SEQ ID NO: 220 - DNA, 2501 bp, Artificial Sequence
  chemically treated genomic DNA (Homo sapiens)
taggggtagggggaaagtttatggacgagtttattttaagttggcgtggggaaaaatataagtacgtagatcgatttattatataacgggagggggaggttaggttacggttagatttattataagggacgaagggtttgagtaatgttatacgtaggtttattagtcgtggtggtggcggcggggagtcgaatattagtaggttatcggttaagttatattttttgcgcgggggcgggaaggatacgtggggttacggattgggttttttattttttaggtttagagtttatttgtgtgtagcgtggcggtggcgttggtaatgttggtagtttcggggggcgggggttttatacgcggttttatcgttttttaggtttgggtttcgaggcggcggtggaggtggtggtggcggtggcggcggtagtatttagaagtcgtttttgcgtttttttatagtttacgtgggttcgaggaggaggagtttaatgtttcgtcgttcgttgattggttaaagcgttattaatcggtcgtaaggtttcgaggggttgggggacgggtttttttttatagagttgtgtcgtgattggcgtaaggggaaatgatggaacgtttacggtttttggagtttcgaggaggcgcgttcggtttttacggtgttttacgtcgattggtttaaggattgacggattgtgagtaattgaaaaggttcggggtttgtgtcgggggggcgggggtttgttttatattgattggtttatatgggattgatggaagatagtttttaaggacgggggtgggtggttttgtttttttttgattggcggacgagggatttttagatttttgttaaaatattaagggggcggtgtcgtacgttatgttgtttagcggaagtagggtttgtatagaaatgggcgtagtagtcggcgggagtgggtcggattgggtttcgcgtaggcgggtagggtagttttacggttagataagattatagagttgggtaaagacgaatttagaatatagcggaggtaggagggtaggatggttgttaggtatacgaaagagtattgagtggtagaaacgaaatgtttttagagggtagggttgaattgcggttagagttaaaaaggggaggaatttggttttgtattgattggcggtggttggatttaatttagaataggggttcgattagggagagcgggatttaggtttgtgtttattggaagttggaatatttataagtaggggttaagataaggtagggttgagttagggtttgggtgtaatttggggtatttggggaatgattgggtgtgtgaaagcgtaaattttagggttttttgattgttgtgggaatgaataaatttttattatgaattggtttattttttatggtaatttaaagggtggcgtttaggaaaaggaatggaagaaagggtgaggtggggggtttaggttgttaagatgatagaagagagggtagtgtataaggttaattggtaaatattgttaggtaataggttggaggtaggattgttggggtattttggaggttttatagagagattggatttttgggttttttagtaattttgtgttttaggaataggttttcgtggtaattagtagggtttatggggaaaaagaagggttatgtgatttaaaggtatttaggttttttaatgtttgaggatggggggaagaagttaatggtgaggtttttttgggaaattttgtaggttttgtagttttttaagtttttgaaaaagaggatagaagagattgaataaagattgggtttgggttacgtttttaggtttgttttgattttttttttttgattttagtttagagggaaagatggttttttttttttttcgtttttttttttttttaggttattattttaaatatagagtttggtagtggggtgagttgtttttatttttagtaatatgtggatatgggttttgatatttatggagtttttggtgaggttgttgttgagtttagagaaaagaaataagaaagggtaaaatgggttttatatgattatgatgatttttttttattattttaagatttatttatattttggatgatttttatttggtttatttttatgtggaaatgttaagttattatttggtttttattgatttaaagattattaaatgtttattgtatgttaggtaattttaggtattgggagatagtagtaaatataataaataaaattttcggtttgatggattttaaatttttgtaaagaaagatataataaaaaattaatggaataaaagttatgtgttagatggttttaattataataataaaaattaaaaatgagagataataaggagtataggagtggggggttgtaattttaaagagggtttagggatggttttacggagaagtatttgagtaaagatttaaagatagtgaattttgagtagtgtggttatatggaggatgtgttttatatataaggg

SEQ ID NO: 221 - DNA, 1176 bp, Artificial Sequence
  chemically treated genomic DNA (Homo sapiens)
gagttcgtatgtttttttgtttttaaggtatcgtagttttttcgtttggaggtttcggggttcgtttcgtcggatttcgttttagaattcgtttagcgcgtaggatatcgtgtttcggcgcgtaaggttagagaggggcgtaattttggacgtggggtcgttatcgagtttgtttttttcggttttcgaaaggtttcgggtttagagttaagattgcgtttgttcgaggttgtcgggttcgttttttttcgcgtttttagcgtagttgttcgtcgttcgatcggaagttcgtatttcgtttcgttttatttcgttcgcgcgtcggtcgcggtattgcggcggttattaggacgttgaagtagcgtagttaatagcgttacgttggcggcgtgttttcggtagttagttaatgagacggtaaattaattatttgaaatatttaatggacggagtattgcggcgttaggagggggattgtgatagggagataggaggttgcggttgattaataaagattaaattggtttaaaaaggcggattttaggtagtttgattgacgggggtaaggttaattaaacgagggagtttgttagtttcgttttggtagtttatttcgagattagcggaggcgggtagggagggtatataagcgttggcggacggtcggttgtagtattttgcgcgttcgtttttttgttgttgtttgtttatttttttttttttttcgtcgtcgtcgtcgtcgttattatgagggaaatcgtgtatttgtaggtcgggtagtgcggtaattaaatcggcgttaaggtaagttgtcggggcgttggggttaggcgggtttagtcgggcggtgtgggcgggcggtcggggaagatggcggtagtagcggtcgggcggcgtttcgtattgcggtcgtcgggtttttttcgcggggaattggtcgagtcgggcgatcgaagtttttaggtaattcgcggttagggtagcgcggggcggggggaggggcggggagggtcggttgtcgcgttcgttcggggcggggttgtttttttgcgtatcggtcgcggtgatttagtttcgttcgttcgggttcgttcgcgttttttgtagttttgggaggtgattagcgatgagtacggtatcgattttacgggtatttattacggggatagcgatttg

SEQ ID NO: 222 - DNA, 1176 bp, Artificial Sequence
  chemically treated genomic DNA (Homo sapiens)
taggtcgttgttttcgtggtaggtgttcgtggggtcgatgtcgtgtttatcgttgattattttttaaaattataagggacgcgggcgggttcgggcgggcggggttgagttatcgcggtcggtgcgtagggaggtagtttcgtttcggacgggcgcggtagtcggtttttttcgttttttttttcgtttcgcgttgttttggtcgcgggttgtttgggggtttcggtcgttcggttcggttaatttttcgcggagggggttcggcggtcgtaatgcggggcgtcgttcggtcgttgttgtcgttatttttttcggtcgttcgtttatatcgttcggttaggttcgtttggttttagcgtttcggtaatttattttggcgtcgatttggttgtcgtattgttcggtttgtaagtgtacgattttttttatgatggcggcggcggcggcggcggggaagaggaggaagtagataaatagtagtagaagagcgggcgcgtagagtgttataatcgatcgttcgttaacgtttatatattttttttgttcgttttcgttagtttcggaatgggttgttagaacgaggttggtaagttttttcgtttgattggttttgttttcgttaattaagttgtttaaggttcgtttttttaagttagtttggtttttattggttagtcgtagttttttatttttttattataattttttttttggcgtcgtagtgtttcgtttattgggtgttttaaatgattgatttgtcgttttattggttggttgtcgggagtacgtcgttagcgtggcgttattggttgcgttgttttagcgttttggtaatcgtcgtagtgtcgcggtcggcgcgcggacggggtggggcgaggcggagtgcgggttttcggtcgggcggcgggtagttgcgttgggggcgcgagggagggcgggttcgatagtttcgggtaagcgtagttttggttttgagttcggggtttttcgggagtcgggaagggtaggttcggtggcggttttacgtttagagttgcgtttttttttggttttgcgcgtcgggatacggtattttgcgcgttgggcgggttttggagcggggttcgacggagcgagtttcggggtttttaggcgaggaggttgcgatgttttaaaggtaggaagatatacgggttt

SEQ ID NO: 223 - DNA, 792 bp, Artificial Sequence
  chemically treated genomic DNA (Homo sapiens)
ttgtagaggaagaagggggttgtcggtaaatttgttgatttaggttttacgagggagtaagtaatattggatttttttcggtatttcgagaatggggtgggggcgtttttaaaggatttttttttttttttagtgtttgtttttgttttcggttcgttttttgttaagatttggggatttttagggtttggagggaaagttttttgggacgattatagagcgttagtattgaattagtttggagagcgcggaaggaaagggtcggttcgtagagggcgcggggaaggtagggtggggacgcggtggagttcgcgttcgtttgttgaaggtttggaagtgtagcgtagaagatagagggtgattaggaagacgcgcgaacggggttggtcggtcggcgggtgggggaggggaggcgggggaaggcggttgagtgggtttttggagtgtgtgtgtttgtgttagtgtgtgtgtgtgtgtgtgtatgtgtgtgtttggcgtttggttagggtgattttttataaattatatgttttttagtttttttttaaaaggttgtgtcgagggttggttagtgaggttcggttcggggaaagtgaaagtttgtttgggttttttcggcgttagagtcgtttttcgtattttaggatagcggtgcggttttcggtcggggcgtttatttcgtagtagttagcgagcgagcgagcgagcgagggcggtcgacgcgttcggtcgggatttagttgttcgtatgatcgcgtcgggcgtcgtcgggcgttgtttttttacggtaag

SEQ ID NO: 224 - DNA, 792 bp, Artificial Sequence
  chemically treated genomic DNA (Homo sapiens)
tttatcgtgggagggtagcgttcggcggcgttcggcgcggttatacgggtagttgggtttcggtcgggcgcgtcggtcgttttcgttcgttcgttcgttcgttggttgttgcggagtgggcgtttcggtcgagggtcgtatcgttgttttgggatgcggagagcggttttggcgtcgagaggatttaggtaaatttttatttttttcgggtcgagttttattggttagttttcggtatagttttttaagagaggattggggggtatgtggtttatgggaaattattttggttaggcgttagatatatatatatatatatatatatatatattgatatagatatatatattttagaggtttatttagtcgttttttttcgtttttttttttttattcgtcggtcggttagtttcgttcgcgcgtttttttagttattttttgttttttgcgttgtatttttaagtttttagtaaacgagcgcgggttttatcgcgtttttattttgtttttttcgcgttttttgcggatcgatttttttttttcgcgttttttaggttgatttagtgttagcgttttatgatcgttttaagggattttttttttaggttttgaaaatttttaaattttagtagaaaacggatcgagagtagggataagtattgggaagggagggaaattttttgaagacgtttttattttattttcggagtgtcgaaaggagtttagtgttatttgttttttcgtggagtttgagttagtaggtttgtcggtagtttttttttttttttgtag

SEQ ID NO: 225 - DNA, 6325 bp, Artificial Sequence
  chemically treated genomic DNA (Homo sapiens)
aagtttttttgggtaaattatatataattagataggttgggttagggttgtttataagattttagtttagagtgtggtgtagtagtttattttttttaggatttttgttgtaataggatatgggagaagggaaatattaacgttagtagaatgggaggaattagattatggagatatgatttttgttttttggtattttttttagttgatttagaagaggatatagagggagatagatatatggttatttttataattataaattttgttatatgttgagaggatggttttttaaagttagttagtgtataagtagtggaggttgggattgttttattttttttgtttagggttatatagtttggtagatttggaaagatttttttgagaaagtgattttggaattgatattttagtggaaataattaggtattgggagggggtgaggtgaggagaaggttaagaatttttatgtagagggaattttgtgtagagattttagttaggaagaggttttgtatagtggaggaattgaaagttaatagttaggttatagtatagagtaaatgatgttggggtgtgaggtgatgttaaaaggtagatattagggttagagggcgtataattttgtaggtcgtgttaatgattttgttttttatttaagaatgttattttaggagattagttaaaaggttagggtgatggtgacggtggaaatatagaaaaaggaatttatttaagaggtatttaaaaagaagtgaaatagagatgagttggagatagattggataaaaagagtgagggagagggaggtgttaggttgtagtttaggttttgagttgttaaagaggagtttttttttttaggtgagttaaggtttagaattacgatttttggttatttttttttatttttagtgtgagaagtggcgagttggttgtttaggtatatattgttattttatatttattgtttaagatagaggcgtatatttggaaagtgaatgagttaggagttagaggagaaggtatgtcggtagagtttagggcgagaggaggaagagagtttgggggcgcgtttttaaaaaggagatagggaagatagagtagaggtcggggaggggagagtaaggattatgataggaggaaagagaggttagggaatattgaggtggaggaattttgggatatgatagttgtaaagaattgtagttaatttaatttagtttttttaatgtgtaattgaggaaattaatttttatgcgtttattttattgtaaatgtggtatttgtatttgagaaattttggaaaatataaagatgtaaagtaaattaagattatttatagtttttttatttagagatatgtattgttaaagtaaggattttgatttttttttttttttgtatttttattatggttggaattgtaatatagatataattttatgttttgtttttaaaatataaataatggttgtaaagcgttttatacgttgatttaaagttttttttgaaataggaaattgagatacgtcggttgtgaaatttattgaagtgagcggcggcgttaggaatttttgggatttcgatttttttgtagttcgtatagttaagggcgagggcgtttttcggtagaagtagtaaatcgtcggtaagtttagcgaggagggttgtcggggtttgggtttgggaattggttggtatttagcggaaagggacgtgagttgagcggcgggggagaagagtgcgtaggttagagggcggtcgtagcgggttttcgcgaggtttttacgtcgggcgatatggggtgtttgttgtttttgttgttttgggcgtttttttaggtttggggaagcgttgaaggtgggtggaacgagggcgtttgagtgtattcgcgggagggcggagagagggagttgggtagggacggggagggtaacgtttgatggggattggtgagattcgggacgtattggcgcgatttaggtagaaaattcgttgttttttggtttcggggagaggtagcgcggtatagagttcgttggtattagtcgttttttgaagtttatttttttttgttttttttttttttttttttatgttggttgttttttcggttatttgttatacgtttttaatttttatttttttttagtttcgtaaaggttttttttttttcgttgtttttagatttcgtttttcgttaatagtagttggacgcgtatcgacggtttggcgtggttgggggagttgtagacgtatagttggagtaacgattcggatatcgttcgttttttgaagttttggttttagggtacgtttagcgattagtagtgggagacgttgtagtatatatttcgggtttatcgaagtagttttattagggacgtgaaggaattcgttaaaatgttacgtttattttgtgagttgagggataggattttgggtcggtatttaaggggagagaatggttatagaaatttaattgggagattgtggtattatttgatgagattttttgttttgtttatttttttttgattttttttttatttggagatgttttaggttttgattttttaaatgtttttcgtttttgtttattttaggttatttatttttttttttttgaagtttgggtttttattataatttgtatattaatttttttttttttattttttttagttttttaaatttttttttgatttttttttatttttttttatagattttttggagttttaggtgttcgttggttgtgaggtgtattttgggaacgttttaaataattttttttatgtagtattttaaggaaaagatattttgagtttttaaggaattttttgggagttaatttaagaggttttattttgggtaaatttggttatttaagtgtttaattaggataagtggacgagggaaatagtgtagtggttttttaatggtatttgtttttaatttgttagtggtttttttgagttagggaagtcggaattgaagaagtaaggttagtttgttttttttattttttgtattttattttagggttttaaacgggtttttttattttagggtttttatttttttgagtatttaaagaagaggaaggtttaggaggggttggataaggggtgagggtatttatttattttatagatattaattgagtattttttgggttttatgaatttaattaatgaataattgggggtgaaaggtgttaggtagttagttaggatttttgtttggtagggggatgttaattaatgtaatgtttgaaataggttatatatgttattttaaaataaagggtgttataggggaatagataaggggtatttataggaggttgggattagagaagaagaaggagtattagggtaggttttttgaagaaggtgggataaatggattgaaagttgtgggagattttatttttagaagtgaatatgttaggggtatataggaaggagggaaataaagatttgaaagttaaaaaggatgatatgaggtttggagtttttaatgtagagtttttattttaagattttttttatttttttgttggatatagtgaagtttaaggtttggttgtttcgtggttttagttttggttttggtcgtttgttgttggtgtgttatgttttaggattttatttaaagtttgtatgggtgaagtggatgcggggtgagtaggagtagtagggtatttagttaggggatattttgtttaatgttgacgagatatggtattttcgagtaattttggatgtggtggttggggaggtagttggtttgttttgtcgggtgaagtatagtagtttagagggttaggatatcgttttttattggggtgagaaaaagttgggtttaagttggaaatggtaggaggtggtttttaggtatagagggaggtattggggtgggatgtggtttgatatatttaggttagaggagttttagagatgaggtttttagtaaaaggatagagagaggggttttagatataggaaggagggaaataaagatttgaaagtttaaaaggattgaaatagtgttttttatatataagaagaaataagattataaaatttagggatttagaagtaggtagcgaataaataattttaggacgatttattttttggtttaaagggagttaggtttttgggaaggtaggttagtaaagatagtttggttggttgagtgttttttgtgtaggggttaatgaatttgtatataatattttattttattatttatagttttttttgaagtaagtattgtttttttcgttatatagatgaggaaatgaaggcggagataggttaattgttcggagttatatagaaagtggacgggttggatttagatttaggtttgttttgttataaagttgttgttttttttttttatgttatattagtaaatgttaaagtgggttgaatttgggatgtttaggtattgaaaataagatggggaatttaaatttatgaggaatagaaattggggttttaagtggaggaggaaataagaagtatttggtatttttatatatgtttagattaggggattggatatatgtagagaggggttttgtgttgagagatagtttatgtttttttagagtaggtgggagttatatttttatgggtttgattgttttggtagttttggcgtgtttgttgtttttttttattgtgggttttatttttcggtttaagaggtaaacgtaagtttttttttttttttttttttaatttttttttttttttatttttggttttttttttttttaatggtttttttttttttatttttttatagtttttattagggcgttttgtgattcgttttgttatatttgtgtttttggaatttaggatttttggattttaggtttttaagattttagttttggtttgtttaggaattgaagatgtaaggaattgaagataggagagatattttgaaaaagtagagaatagttatgaggtagtttttattatatttttttaatatttatttaaaagaatttaaatttttttttaaaaattatattataagtttataagtttaaatggttttgtgaaattagaagtgtaaaggtgtgtaaatttgtatttgaagatttattagggataagtaggtaagagttgatgtgagtgtgtgtgatgggatttgtaaggaattggaatatatatgttttatttaaaggaattagttgtagttgtttgttgttaagtataaagttaggatttggtttggttttaatcgttttttaagaaaattggaaatttggatttttagcgaatatgtttgattttaaaaggttgatttaagtttttataaaatattatgtgggatattttaaatatatatttattgattgatgataaatttaggagtttgtgtgttttttataaaaagtttgttttggatgttatattggtagttggaggatatagtttttattgtaaatttggatttacgattgaagaaggatattttttttttaaaagaaagttaggttataagaaatagaggcgttttatatttttatttggtgtaattaataaacgaagataaattatagtgtatgtgtattatgttgaaaaaaattattttgagtaaggatattttttttaaatggttattattttttttttttggaggaagattgttatgaaggtatttttttttttttaaaacgataacggtaataataatagttttttttatttatagttattaaaagagataatgtagggaaagggttaatattatttgggtaagtatgagttgtagcgatgatggtgatggtagtttagttatgttgtgtttttattttagagaggatagagtaggaaatttataggggtagtagatttttttgatgttaaagaaataaggaggttaaaattatgtttgtttagttgggaggtaaattttttggtagttagggtttttgaatatttagaaaaaataagtgagatttaattgttggagagtgtttgtttgagaaaagtaatattttatattttttatattagatttgtatatatgaatttaggatgtgcgtgaagattttgttagttttaatatattttaaagtatttggatatgtttataatttaagtgttttgggaggttgagataggaggattgtttaaggttaggtatttgaaattagtttgggtaatatagtgagattttgtttttataaaaaattaaaaaattagttatttatggtggtgagcgtttgtagttttagttattttggaggttgaggtgggaggattttttgagtttatgaattt

SEQ ID NO: 226 - DNA, 6325 bp, Artificial Sequence
  chemically treated genomic DNA (Homo sapiens)
gaatttatgggtttaagggatttttttattttagtttttagagtagttaggattataggcgtttattattatgggtggttagttttttaattttttgtagagatagggttttattatgttgtttaggttgattttaaatgtttggttttaaataatttttttattttagttttttaaagtatttggattataggtatatttaagtgttttgggatatgttgaagttagtagaatttttacgtatattttaaatttatatgtgtaagtttagtatagagagtgtgaaatgttattttttttaagtaaatattttttaatagttaagttttatttattttttttgggtgtttagggattttgattgttaagagatttattttttagttaggtaaatatgattttggtttttttatttttttggtattagaaaggtttgttatttttgtaagttttttgttttgttttttttaagataagaatatagtatggttgggttattattattattatcgttgtagtttatgtttgtttaagtggtgttggttttttttttatattgttttttttaatagttgtaagtaaaggagattgttgttgttgtcgttgtcgttttgggaaggaagggatgtttttatgataatttttttttaaggaaaaaaagtgatgattatttgagagaaatatttttatttagagtagttttttttaatataatatatatatattatgatttattttcgtttattaattatattaagtaaaaatgtgagacgtttttgttttttataatttaatttttttttaaagagaaaatgtttttttttagtcgtaaatttaaatttataatagaaattgtgttttttaattgttaatatgatatttagggtaaattttttataaaagatatataaatttttgggtttgttattagttagtaggtatgtatttgaggtgttttatatagtattttgtaaaaatttgagttaattttttaaaattaggtatgttcgttgaaaatttagatttttagtttttttgaaaaacggttaaagttaagttaggttttgattttatatttgataataagtagttgtagttgatttttttggataggatatgtgtgttttagttttttatagattttattatatatatttatattagtttttatttgtttgtttttggtaggtttttagatataagtttgtatatttttgtatttttgattttatagagttatttgggtttataaatttgtagtgtaatttttgaaaaagaatttaaatttttttagataaatgttaaaagggtgtgatgaaagttgttttatgattgttttttatttttttaaggtattttttttatttttaattttttatatttttaatttttgagtagattaggattgaagttttgggaatttgaggtttagaggttttgggttttagagatatagatgtggtaaggcgagttataggacgttttgataggaattgtgagagaatagaaagggaaagattattaaggaaaagggaagttaggaatgaaggggagagagagttgaggaaagggaaaggggagaatttacgtttgttttttaaatcgggaggtaaagtttataatgaggaggaatagtaagtacgttaggattgttaaggtaattaagtttatggaggtgtagtttttatttgttttggaggaatataggttgttttttagtataggatttttttttatatatatttaattttttggtttaggtatgtgtgagggtattaggtgttttttatttttttttttatttaaaattttaatttttattttttataagtttagattttttattttgtttttagtgtttgggtattttaaatttagtttattttggtatttgttagtgtagtatagagggaaagggtaatagttttgtagtaaggtagatttgaatttaaatttagttcgtttattttttatgtggtttcgggtagttaatttattttcgtttttatttttttatttatataacgaaaagagtagtatttgttttaaagaaaattgtgaatgatgagatgagatattatatgtagatttattggtttttatatagggagtatttaattaattaagttatttttgttaatttgtttttttaaaggtttggttttttttaagttaaggaatgaatcgttttgggattgtttattcgttgtttatttttggatttttgagttttgtagttttgtttttttttgtatatagagagtattattttaatttttttagatttttaggtttttattttttttttttttgtgtttggaatttttttttttatttttttattgggggttttatttttgaaatttttttaatttgggtatattaagttatattttattttagtgtttttttttatgtttgaggattattttttgttatttttagtttgggtttagtttttttttattttagtagaggacgatgttttggttttttagattgttgtgttttattcgataggataggttagttgtttttttagttattatatttagggttgttcggagatattatgtttcgttagtattgggtaggatgttttttggttgagtgttttgttgtttttgtttatttcgtatttattttatttatataggttttgggtagaattttgagatatggtatattagtagtagacggttagggttaggattggggttacgggatagttaggttttgggttttattgtatttaataagggaatgggggggattttaaagtgaaaattttgtattagaggttttaggttttatattattttttttgatttttaggtttttattttttttttttttgtatgtttttgatatgtttatttttggaaatgaagttttttataatttttaatttatttgttttattttttttagggagtttgttttgatattttttttttttttttggttttagttttttatgaatgttttttgtttgtttttttataatattttttgttttgaagtaatatatgtagtttattttaagtattgtattaattaatatttttttattaagtagggattttaattaattgtttgatattttttatttttagttgtttattaattgaatttatagaatttaagaggtgtttagttgatgtttgtgaaatgaataaatatttttattttttatttagttttttttgggttttttttttttttgaatgtttaaagggatgagaattttggaatggaaaagttcgtttggagttttgaagtggaatgtagggagtaaggaaggtaggttgattttgtttttttagtttcgatttttttgatttaaggaggttattgataaattgggggtaggtgttattaaggagttattgtattgtttttttcgtttatttgttttggttgagtatttgaatggttaagtttatttaaagtggggttttttgggttggtttttaagaagttttttggaaatttaggatattttttttttgaaatgttatatggaagaagttatttgaggcgtttttagggtgtattttatagttagcggatatttggagttttaagggatttgtggagaggaatggagaaagattaaagaagggtttaaaagattgggagagatgaaagagaagaaattgatgtgtaggttataatggggatttagattttagggaaaggaaagtaagtgatttggagtaggtaggaacgagggatatttgaggagttaaagtttgggatatttttaggtagaagggaaattagaagagggtggatagagtagagaattttattaggtggtgttatagttttttagttgagtttttgtggttattttttttttttgggtatcggtttaggattttattttttagtttataggataagcgtagtattttggcgaatttttttacgtttttggtgaagttgtttcgataaattcgaaatatatgttgtagcgttttttattgttggtcgttgaacgtgttttgggattaaggttttagagagcggacggtgttcgagtcgttgttttagttgtgcgtttgtagtttttttagttacgttaagtcgtcggtgcgcgtttagttgttattggcgaaggacgagatttggaggtagcggagggggaaaagtttttgcgggattgggagagaatgaagattggaggcgtgtagtaagtggtcgggagagtagttagtataaagagaaggaagaaagaaataagaggagatgagttttaggaggcggttgatgttagcgaattttgtgtcgcgttgttttttttcggagttagggagtagcgagttttttatttagatcgcgttagtgcgtttcgggttttattagtttttattaggcgttgtttttttcgtttttatttagtttttttttttcgttttttcgcgagtgtatttaagcgttttcgttttatttatttttagcgtttttttaagtttggaggagcgtttagagtagtagaaatagtaggtattttatatcgttcggcgtggggatttcgcggaggttcgttgcggtcgttttttgatttgcgtatttttttttttcgtcgtttagtttacgttttttttcgttgggtgttagttaatttttaagtttagatttcggtagtttttttcgttgggtttgtcggcggtttgttgtttttgtcgaagggcgttttcgtttttagttgtgcgagttgtaaagaggtcggggttttaggaatttttggcgtcgtcgtttattttagtaggttttataatcggcgtgttttaattttttgttttaaaggagattttgggttaacgtgtgggacgttttataattattatttatgttttggaagtaggatataaggttgtgtttgtgttataattttaattatggtaaaaatgtaaagggaaaaaaggattaaagtttttgttttagtagtatatgtttttaggtggaaagattatgagtgattttaatttgttttatatttttatgttttttaaaattttttaagtgtaagtattatatttataataaagtaaacgtatgaaaattaatttttttagttgtatattgagagaattggattaggttggttataattttttataattgttatattttaggatttttttattttagtgttttttagtttttttttttttttgttatggtttttgttttttttttttcggtttttgttttgttttttttgttttttttttggggacgcgtttttagatttttttttttttttcgttttaggttttgtcgatatatttttttttttggtttttgatttatttattttttaaatatgcgtttttgttttaaatagtaagtgtaagatgatagtgtgtatttggatagttaattcgttattttttatattgaaaataagaaaaagtgattaaaaatcgtggttttaagttttagtttatttggaggaaaagatttttttttggtaatttagaatttgggttgtagtttgatattttttttttttttattttttttatttaatttatttttaatttatttttattttatttttttttgaatattttttgaataaatttttttttttatatttttatcgttattattattttaattttttgattgattttttgaagtagtatttttgggtagaaaataaaattattagtacggtttgtaagattatgcgttttttagttttggtgtttattttttgatattattttatattttagtattatttgttttgtattgtagtttggttgttagtttttagtttttttattatgtaaaatttttttttgattaaggtttttgtataaagttttttttatatgaaagtttttgattttttttttattttatttttttttaatgtttagttatttttattaaggtattagttttaaggttatttttttagggaagtttttttagatttgttagattgtgtgattttaggtaggagaagtagggtagttttaatttttattgtttgtatattaattggttttgagaagttatttttttagtatgtagtagagtttataattatagaaatggttatatgtttgtttttttttgtgtttttttttaaattagttgggagaggtgttagaaggtaaggattatgtttttataatttgattttttttattttgttaacgttaatgtttttttttttttatattttgttgtagtaagagttttagagaaaataggttattgtattatattttaggttgggattttgtagatagttttaatttagtttatttaattatgtgtaatttgtttaaaaaagttt

SEQ ID NO: 227 - DNA, 5942 bp, Artificial Sequence; identical to SEQ ID NO: 141
  chemically treated genomic DNA (Homo sapiens)

SEQ ID NO: 228 - DNA, 5942 bp, Artificial Sequence; identical to SEQ ID NO: 142
  chemically treated genomic DNA (Homo sapiens)

SEQ ID NO: 229 - DNA, 4370 bp, Artificial Sequence
  chemically treated genomic DNA (Homo sapiens)
ggatttttggaaaatggagaagttgtgttaatagaggggggttagaaatttttattttagaatgttgtagaatgttgggagatatttaggatgtgagttagggattttttggaagtgtttgttttggttttattcgattttaggtagtttttagttgtttgtatagtcggatggggagggggtttgtatagagttggagttagaggagagagttggtttattttttacggtaggatggggaaattttatagattatattgttattcggttttagtttttcgtttcggcgtttagagggtaatttttatttatttcgttcgtttttttgaattagagtgatttaggttgtcgttcgtttcgtttttttatttcgagttggtacggaggtatagcgttagaggggggttttaggcgtttcgaggttttgtttttgcggttttttttttgcgggggtgggcgttttttttcgggtaggggttacgtggttttggtcgggcggggggttcggtttatttcgcgtcgggtttagtgatttaggtcgtagttgttatcgcgttatatgagggaggtcggcggttattcggcgggggaggggatcgtggttggagttcggggcggggtcgcgcggtaggcggggcgggagtcggggggcgtagttagagagtttcggagtcgcggcgggagaggaacgcgtagttagttttgggaagtttaggtgaggtcgcggggattcggcggatttcggcgcgggttgggagagattattcgtagtttttttttttagggttcgttttaggttcgcggagattcgttcggcgttttttagtcgttttggagtaattttgtttcgaagttttttgggttcgggtagggtgtggcgggggtgttggttgtattttttttttttttggtgggcggggaggttagagtttaggggaaaggggttggggcgggggtcggggttgggttgaagatcgtttttttaggttgggtgttgggtggggaaagggtgtttgacgttcggagattggcgggtcgagggtcggcgttaggtttaagtttttgtcggcgtttttggatttgttttgggttttagaggcggcggggcggggttcgggtttcgcggtcgtcgtttttattttttttttgcgggtaaagagggggttgggagacgtggattcgatcgcgggttttcgggtgggaggggtcgggaatcggggtcgtgaagggaagttttcgagggtcggtcgggagttcggaaatcgaggttttttttcggttagttttaattttttcgtttttttttttgttttaggttcggtagttatggcggtggaaggaggaatgaaatgtgtgaagtttttgttttacgtttttttgttggttttttgcgtgagtggcgaggggttttggggggcgcgtcggtagggtgcggggagatttggttttatagtggtgagggttgagggaatgagaattaaggtagttggagattagatgtggaaagaaagttagggaaagatagcgtagttatttttttttttagtttttttggatatttgaggtttgtttttatcgagaatggttattttgggtgtgtagtaatttttatttttattttttttggttttttttgtttggtgatttaattatttgtgatatggggtagtggggtaattagttaatcgtttgatgttatcgttatggggttttttttcgttttttttttttttttttttttttttttaatttttttatttttgtttagtttttttttttttttttttttttttagcgtttgggggtgaggaagggttttgtttattttaatttgtttttgttttgggtttttggtttgagaggttattgtttgtatagggagggatatattatttttgtttttttttttttttttttttttttggtttaattggttagaggaattttagttatagttgatgcgcgcgtggatgtgtattggaggatagtgagggggtagttttgggcgcgaattgagttgggagttttggaggtttgtagaaagtattattttaggttagaaatacgtgttttgaggttaaggttttttgggaggtttttgaatttggttatgtttttgattaaagagtcgggaggggattaggggaggtaggggtaggtaaggatgggttatttttttattttatagttaaagaaattttttagaggtgtgagaattttttttggggatggggttaagtttgtgttttaggtgtattttttgttttttattatggagggttattgtgttgtggatatggtttaatttttatttgatttttttttaggtttgtgtagtgggattgattgtcgtgggtgtcggggtatagtttgttttgagttagattataatttagggggttatttttggttttttgttgttagtggttattatcgtagtgggtgtttttttttttttggtggtttttgtgggttgttgcggggtttgtaaggagaattattgttttatgattacggtgcgttggggcggattaatatgggcggtttgggattgttagagtagtttggttcgggtttaggaaggtgggtgaggtgggtgggtgaggaagatttttgtgagtgtttagggatcggttgtgttaaaacgggtttttgtaatgtatagattttaaatttgatttttgttttttgtttttgtagtttgttatttttttgttttttattatgttggtggaggtggtcgtagttattgttggttatgtgtttagagataaggtaagtagggaataatgggaagggtttgttttagtcgggtttgggattttggtgtttgaattttgattgtaatagtgttttttcgtatttttaggtgatgttagagtttaataataattttcggtagtagatggagaattattcgaaaaataattatattgtttcgattttggataggatgtaggtagatgtgagtggggttgttgggagtaggggtggtgggaatagagaatttttatttttaaggttgggtgtggtgatttacgtttgtaattttagtatttttgaaggtcgaggtgggtagattatttgaggttagaagtttaagattagtttggttaacgtggtgaaattttgtttttattaaaaatataaaaattagttaggtgtggtggtgagtgtttgtaattttatttatttaggagggtgaggtaggagaatcgtttgaattcgggaggcggaggttgtagtgagtcgagattgagttatcgttgggtatttgtttgggtaatagagtaagtttttgttttaaaaaaaaaaaaaaaaaaaaaaaagaatttttatttttatattgaaggtgaaggtttatttaataatttttttttttatatttttttttttttttagtttaagtgttgtggggttgttaattatatagattgggagaaaattttttttatgtcgaagaatcgagttttcgatttttgttgtattaatgttattgtgggttgtgggattaattttaacgagaaggcgatttataaggaggtagggaggagattgtgtatgggatttgggaaatttgggaaatgttttagaatgtaagagatttaggatggaggtggatagggttagggatggggaggggatttggaaatgttaagggtggggtgaaaggtataggggtagggaagagattgatggattaagggagggggttggggtgggaagtttttgatggtgtttttgttttttgtgtttgttatttttagggttgtgtggagaagattgggggttggttgaggaaaaatgtgttggtggtagttgtagtagtttttggaattgtttttgtcgaggtaagagataattttgagtaggggttgggattttgtttagggtgtttggagggaaggggttgaggggaggagggtgttgaataggaggtattggtttgggagtgtgtgtttggagttttttgtatgggtttgaggtagttagtttttttgatttttttttatttttgtttttatcgggttttttaggttttgggaattgtttttgtttgttgtttcgtgaagagtattagaagtggttacgaggtgatgtaggggtttggtttttttagtttttttatttgggggagtggaatagtattttttaggttttttaattaaacggattatttttttagatcgaaaagagatggtttgagtttgttttagagtgatgtttgatttttttttttttttattgatgttttttgttttttgggattttaatgtatgtgtatttcgaggtttattttggggggtgtttgggaaaggaggattttgcgaaggtgttggttgggtaggtagtgggagaagtgaggattt

SEQ ID NO: 230 - DNA, 4370 bp, Artificial Sequence
  chemically treated genomic DNA (Homo sapiens)
ggatttttattttttttattgtttgtttaattaatattttcgtaaagttttttttttttaaatattttttaaaatagatttcgaagtatatatgtattaaggttttagaggatagggaatattagtaaggaaaggaaggaattaagtattattttaagataaatttagattattttttttcggtttgaaaaaataattcgtttaattgaaaaatttggaggatattattttatttttttagatgaggaggttgaggagattagatttttatattatttcgtagttatttttgatattttttacgaggtagtaggtaaagataatttttaaaatttagaaggttcgatggggataggggtggagaggagttagaagggttagttattttagatttatgtaagagattttaaatatatatttttaggttagtattttttgtttagtatttttttttttttagttttttttttttaggtattttggatagagttttagtttttgtttagggttattttttatttcgataaaagtaattttaagggttgttgtagttattattagtatatttttttttagttagtttttaattttttttatatagttttgaaggtggtaggtataaaggataaaagtattattagaaattttttattttaatttttttttttggtttattagttttttttttgtttttgtattttttattttatttttagtatttttagattttttttttatttttgattttgtttatttttattttgggttttttgtattttaaaatattttttaggttttttaagttttatatatagttttttttttatttttttatggatcgttttttcgttgaaattaattttatagtttatagtaatattaatgtagtaggagtcggggattcggtttttcgatatggaagggatttttttttaatttgtgtagttagtagttttatagtatttaaattgggggagggaagaaatatggagaagaaggttgttaagtgaatttttatttttaatatggagatgagaatttttttttttttttttttttttttttgagatagagatttgttttgttgtttagataagtgtttagcggtggtttaatttcggtttattgtaattttcgtttttcgggtttaagcgatttttttgttttatttttttgagtaggtgggattataggtatttattattatatttggttaatttttgtatttttagtagagatagggttttattacgttggttaggttagttttgaatttttgattttaggtgatttgtttatttcggtttttaaaagtgttgagattataggcgtgagttattatatttagttttggagatgagaattttttatttttattatttttgtttttagtaattttatttatatttgtttgtattttgtttaggatcgaagtagtgtggttgtttttcgggtaattttttatttgttgtcggaagttgttattaaattttgatattatttgagagtacggaggagtattgttgtagttagaatttaagtattagggttttagattcggttgaggtaggttttttttattattttttgtttattttatttttaaatatatagttagtaatggttgcggttatttttattaatatgataagagatagaaagatggtaaattgtaggagtaaaggatagaagttaagtttggagtttatgtattataggggttcgttttggtatagtcggtttttggatatttataaaggttttttttatttatttattttatttatttttttgagttcgaattaagttgttttggtagttttagatcgtttatgttggttcgttttaacgtatcgtgattataagataatagttttttttgtaggtttcgtagtagtttataaaagttattaggaagaggaagatatttattgcgatgatgattattggtaatagagagttaggggtagttttttggattatggtttgatttaggataagttgtgtttcgatatttacggtaattagttttattgtataggtttaagagaaaattaggtgaggattaggttatatttataatatagtggttttttatggtggagggtagggggtatatttaggatatagatttgattttatttttaagagagatttttatatttttagggaatttttttggttgtggggtagggggatgatttatttttgtttgtttttattttttttgattttttttcggttttttaattagggatatgattaaatttaaaaattttttagaaagttttgattttaagatacgtatttttgatttagaataatgttttttataggtttttagggtttttagtttaattcgcgtttagaattgtttttttattattttttagtgtatatttacgcgcgtattagttgtgattaaggtttttttggttagttaggttaggagaagggaagaggaaaagggagtaagagtgatgtgtttttttttatataaatagtagttttttaagttaggagtttagggtaggagtaaattgaagtgggtagagtttttttttatttttaagcgttgggaggagggaaagggggagaggggttggatagggatgagagggttggggagggagagaggggagaagggagagcgaagggaagttttatggcgatagtattaggcggttggttggttgttttattgttttatattataagtggttgggttattagataggaagggttaggagggatgggggtaggggttgttgtatatttaggatggttattttcggtggaaataagttttaggtgtttaggaaaattggaggagggagtggttgcgttgtttttttttggttttttttttatatttggtttttagttgttttaatttttatttttttagtttttattattgtggagttaggttttttcgtattttgtcggcgcgttttttaggatttttcgttatttacgtaaaaggttagtaggaggacgtagagtaagaattttatatattttatttttttttttatcgttatggttgtcgggtttggggtagaggggagggcggggggattaaaattggtcgaagggggatttcggttttcgggttttcggtcggttttcgagggtttttttttacggtttcgattttcggttttttttattcggaaattcgcggtcggatttacgttttttagttttttttttattcgtaggagaggggtgggggcgacggtcgcgaagttcggatttcgtttcgtcgtttttggggtttaggatagatttaagggcgtcggtaggggtttgagtttgacgtcgattttcggttcgttagttttcgggcgttaaatattttttttttatttaatatttagtttggagaaacggtttttagtttaatttcgattttcgttttagttttttttttttgggttttgattttttcgtttattaaaaaaaaaaaaagtgtagttagtattttcgttatattttgttcgggtttagggaatttcgaagtaaagttgttttagggcggttggagagcgtcggacgagttttcgcgggtttggggcgagttttggaggaagggattgcgggtggttttttttagttcgcgtcgaagttcgtcgggttttcgcggttttatttgggttttttaaggttggttgcgcgtttttttttcgtcgcggtttcggggttttttagttgcgtttttcggttttcgtttcgtttgtcgcgcggtttcgtttcgggttttagttacggttttttttttcgtcgagtggtcgtcggttttttttatgtgacgcggtaatagttgcggtttgagttattgggttcggcgcggggtgggtcgagtttttcgttcggttagggttacgtggtttttattcggaagaaggcgtttattttcgtaaagggaaagtcgtaagggtaagatttcggggcgtttggggtttttttttggcgttatattttcgtgttaattcggggtaggagagcggggcggacggtagtttgggttattttggtttagagaagcggacgaggtgggtgagagttattttttgagcgtcggggcggagagttgaggtcgggtgataatgtggtttgtgaggtttttttattttatcgtaggggatgagttagtttttttttttggttttaattttgtgtaagttttttttttattcgattgtgtagatagttggggattgtttggggtcgggtggggttagaataaatatttttagaaagtttttggtttatattttgggtgttttttaatattttatagtattttagagtggggatttttggtttttttttattagtatagtttttttattttttagggattt

SEQ ID NO: 231 - DNA, 8759 bp, Artificial Sequence; identical to SEQ ID NO: 103
  chemically treated genomic DNA (Homo sapiens)

SEQ ID NO: 232 - DNA, 8759 bp, Artificial Sequence; identical to SEQ ID NO: 104
  chemically treated genomic DNA (Homo sapiens)

SEQ ID NO: 233 - DNA, 4233 bp, Artificial Sequence; identical to SEQ ID NO: 129
  chemically treated genomic DNA (Homo sapiens)
  unsure (2320, 2321, 2336, 2351, 2363, 2413, 2723..2726, 3730): unknown base

SEQ ID NO: 234 - DNA, 4233 bp, Artificial Sequence; identical to SEQ ID NO: 130
  chemically treated genomic DNA (Homo sapiens)
  unsure (504, 1508..1511, 1821, 1871, 1883, 1898, 1913, 1914): unknown base

SEQ ID NO: 235 - DNA, 1303 bp, Artificial Sequence; identical to SEQ ID NO: 175
  chemically treated genomic DNA (Homo sapiens)

SEQ ID NO: 236 - DNA, 1303 bp, Artificial Sequence; identical to SEQ ID NO: 176
  chemically treated genomic DNA (Homo sapiens)

SEQ ID NO: 237 - DNA, 6621 bp, Artificial Sequence; identical to SEQ ID NO: 123
  chemically treated genomic DNA (Homo sapiens)

SEQ ID NO: 238 - DNA, 6621 bp, Artificial Sequence; identical to SEQ ID NO: 124
  chemically treated genomic DNA (Homo sapiens)

SEQ ID NO: 239 - DNA, 8056 bp, Artificial Sequence; identical to SEQ ID NO: 73
  chemically treated genomic DNA (Homo sapiens)

SEQ ID NO: 240 - DNA, 8056 bp, Artificial Sequence
  chemically treated genomic DNA (Homo sapiens)
aatttttaaatttaaaataaataaaaaattaatattaattaattaaaataataaaaattttttttttattttttttttaattttttaatttttatatttttttatatatttaattattatttttaattttttatattttttttatttattttttatttttttatttattttttattattttttttaattattaattttaattattattataatttttaaaaaatattttaaaatttttaaaaatttaaaaattttaaaatttttaaatttattttaataaaaaaaaatttttattttttttaaaattattttttaaaaaaataattaataaaaataaataaaaataataataattaaaaaaaaaaaaaaacgaaataaaatatttataatttaaaatttaatttaataatatatttattaattattttattttttttaaaaataataaaaaaaaattaattttaaaaaataaaatatatttaaataaaaaaaattaaaatttataatatttataatattaaatattatatattaaaattaaaattttatataattattataaacgttttattaaaattatttatatttaataataatatttataaaaaaatattatataaattttaaaattttttaaaaataatttttaaatataaatttattaaaaaaaaaaaaaaaataataaatataaaaaaatttttttatatttaaaatttaatttaaaataatttatattataattaaattttttaattttaaaatttaattaaaattataaaattatatttaattatatatttaaaataaatttataaacgattatttaaaatatttttattaaaaaaaatcgttttttttatttttttttacgtataaaaatttcgtaattatttaaatttatattttaattattttcgtcgttttcgtaataaattttttttaaaaataaatttttatttttttatttaaacgaataaaatatatattataatttttttaaaaataattattttaaaaatttttttattattttttaatttcgaaatttaattacgtaaaataaaaaaatttcgttttaattcgttttttttttaacgttttaaaacgttatatattcgttttttaatatttttttcgatattcgaaaatttaaaattaatatattttcgattattattaatttattttaaaattttaatattatttaatttaatttttttaataataaaataattttttcgaataaaaaaaaacgttacgtaattatattaatatataaaaacgtaatattttttaaaaattaataaattataaaaaaatttattataatttttaataaaaaataatttaaattttaattttttattaaaaatttattttttttttataaaaataatatcgattttttttttatttttttattttttttttttaaaaaaaaaaataaaaattatttttttaataaaattatattaaaataattaattattaaattaatattatataaatataaaatataaatacgttaaaaaaatttttaaataaaattatttttttaaaaaattatatttaaatttaatattttaatttatatttataattttaatattttaaaaaatcgaaataaacgaatcgtaaaattaaaaaaaattattttaattaatacgataaaattttatttttattaaaattataaaaattaatttaatataataatatatatttataattttaattatttaaaaaattaaaataaaaaaattttttaaattaaaaaattaaaaattaattacgttattatattttaatttaataataaaataaaatttcgttttaaaaaaaaaaaaaaaaaaaaaaaaaattaatttaattaattatttttattttttttattataaaaataaaaattttataaaaaaaaaaataattaaattataatataaataaaaaaaatataattttttaaaataaaatattaatattaatttttatttaaaatttaataaaattttaaatatatttaaaataaaatatatttttaaatattttttatttttaaaaaattttattaaaaatattttaaatattataaataataattataaattatttaatataattttaataattttttattttattaaaaataaaaaataaaaaaaaaaaaaattataattttattaaaaatttaaaaaaacgaaaaaaaaaataaaaaaaaaaaaaaatttaattttaataaaaatttattttttaatatttaaaataaattaaaaaaattttaattttttaatttatttatttttaaaataatttattaattttcgtatttaaataaattttatttaatttttaaatataattttttatttttataaataatttattaaattttattatttttcgaaaattaaaaaaaaaataatttatttatttttaaaaattaatttttttttatttttatttatatattttttattatttcgttttaaaataattaaaatattaacgaaaaataaaaaaaaataaattaaattataaaataaattaaaaaatttaaaaatttaaataaaatttttaaaaaataaaaaataaacgaaaaaaaaaattataaatataaataatttaaaaaaaaaaaataaaaaaaaacgttaaaatttaaaattttaaaaataataaatttttaaatttttttaaatttattattttttttttttaataaaaataattcgttaaataaattattaataaaaataaaaaaaatatttaatcgtttatttttaataaatttaaacgaatttcgtttattaaaatcgttattaataataaacgatatttttttataaaatattaaaaattcgaaattattttacgaaaaaaatttcgtcgaaaaaaataaaaaattcgaaaacgaaaaaaaaacgttaaaattttacgaaacgtaaaatttaaacgaattattatcgttaaaaaaataaaaaaaaattatcgaaaaatcgatatattttaaaacgacgacgtttaaattttataaatataaattaaaaataaaataaacgttataatcgcgaacgaaattcgaattatcgttatttttacgcgtaatttaataaaaaattaatttttttaaaacgaatttaacgacgatcgaaaaatcgttttatatataattttaaataataatatttttaataaaaatttcgtcgttcgaatcgtaaataaaattttaatttattatatttttttttaataattcgattattatttttaattaatcgatcgtaaaaaaattttcgttatcgtcgtcgttattttttcgaaaaaaaaaaaatataatcgtaacgtaaaaaaacgaataaaattcgaaacgacgattaaaaaataaaaacgaaataaataataattcgaattttttttaaatattttcgttaaacgtcgaaaattataattcgttttattattattattaataaaaattttttttttcgtcgtaataaaaatacgattatatcgaatcgtaatcgaaattataatttttattaataaaattaacgttaaaaaatatcgtcgcgaaaaattattaaaacgaaatatataaaacgaaaaataattttaaattaaaaaaattttaatacgaaaatttaacgtaacgcgtaatacgcgttataatttcgaatttttttttttataaaattattttttaaaacgattaaataattttaataaaaaaataaaaaaaatatttttttattttttttaaataattttttattatttcgaaaacgtatttaataaattaacgttttaatattcgtcgaattttcgttttttcgaaaattcgaaacgtaaaattcgaaaatcgatttcgtaacgataaaaaaatcgaaatcgattttaacgtttttaaaaaatcgcgaaaaataacgataaaaaatataatttattaaaatttaaaatataaaattttacgttatttaaaaaaaaaaacgaaaaacgtttaaacgaaaacgattacgtaaatttcgtttcgcgtcgaaattttttcgttacgattatttttattcgcgttttaaacgtttttttattttcgtcgatatcgtaattttttttaattttttttttttatcgttttcgtttttatttttaatattattttcgtttaatattttttttattaattttttttttttttttcgtcgattaaaataacgaatttaatcgcgaattttaatatttttttataaatataaaaaaaatattaaataataataaaaatattttttttcgtatttaatacgaaaatataattacgttaaaaatttcgttacgatatttttttcgaaattattttattaaaaataataattattttaaaatcgtttaaaatttcgtttttcgtaattttttcgtatttcgaacgcgaaaatattcgaaaacgatcgcgataaaaaaattaaaattaaatacgaaaattcgttttaatttttttaaattaacgattataaaaaaatcgaatatattttcgtttttttttttttttatttacgtttatttaatattacgttttaatatttttaaaaatttaaattttaaattattttattattttttaaaaaattaaatattaattttttaaaaaaattaaaacgaattaaaatcgtcgcgaaaataaacgaacgaaacgcgtcgtaatattcgttttcgattattaaaaatacgataaatcgaaatttaattattttttcgaaaacgaaaataaattaacgtttacgaaacgatttaatttatataaacgatatacgattttttttttaaaaaatttaaaatataaaaaattttttatttatcgtaaaataatttttcgttttttaaaatttaaaaaataattaatataataaaataaaaatattcgatcgatcgaaaatcgacgtaaatatatttataaaataaaaatttcgaaaaaataatcgtaaaaattattttcgttttttttttattttttttttttttattttaataaattattatatttcgatttaattttaaaataatttttatttcgaaaaaaatattaataacgtaaaattaaaaaaaaaaatattttatttaaatattcgatttattttaaaattaaattaataaaaaaataaattaaaaaataaataaatttcgatatttatttaattttttatttttcgaaaaaaatttaatatttaaataattataaaaaaaattttttaaaaaaacgaattttaataacgacgaaaaaatatttttaaataaataaaataattttttcgcgtcgaaaaaatcgcgtttttaatcgaatattattaattttaatataaaatattcgttcgttattataaataaaatttcgtaaatacgataaaaattacgaatcgttatttaaaaaattaacgaaaaatttaaattaaaaacgaaattttttattcgtttcgaatttttttttttaaaacgttcgtaacgtaattttattcgttcgatttttttattttaatcgatcgttcgttcgttttttttattttttattaaaattattataacgaattaaataaaatttcgaaaatcgatttttatatttaacgcgattttttttttcgttttttttttcgttaaatttttaaaaaattttatttttttcgaaataaaaaaaaaattaaaaacgatcgaaattcgacgataacgatcgcgaataatataattcgaaaatttttaatcgtttaaattttcgtattataaaaaatcgataaacgaaaattaacgaaaaaaaattttttttttttttttttacgttttttattttaaaaattcgaaaaaaacgtttataaaaaaaataaaaaaaataaaaaaaataaaaaaaaaatttaatcgaataatcgaatattttaattttaaaatataaataaaataaaaaaatcgtataaattaattacgcgcgtttattatttttttttatttttttttaaattttttttttttttttattattttttcgtaataatattatttaataaatcgtatttttattttataaatataaattatcgtaaacgaaataattattttttatatcgaaaacgtattacgcgtttatcgttacgttacgcgcgtattaaattataaaacgtttcgttaaaattaaaaaaaaaatcgcgttttaattaaaaattttaaaaaaaataaaaaaaaaaaaaatattaataaacgcgcgtttaaaacgtaaaatattaatataaataaaaaaaaataataaaaatataaaaaaaaaaacgatatttaaaataattaaaataatttaataacgtattattacgtatatttaaaaaacgcgttataaataaatttttattatatttattaaaaaaaattatatattatatattatatatatataattatttaaattaaatattttttatttaaattaaattttttaatttattattaaaataataaatatcgttttttttatttcgtttatttaaattttcgtaaaatttcgtacgaaaaacgtttatttaattttaaaatatatttatttattttaaaattaaattaaaacgaaaaaaaaattatttattttttattaatttatattttatcgttttatttttacgttttttatacgaaatttttaattttttaattaaattttaaaaaaaataaattttttttacgttttataacgtcgatttataataatttcgaattatcgaatttaaaaaaaattaaaaatattaaacgaaaaaatataaaaaaaataaaaaatattcgaatcgcgaaatcgaattttttaaaaaaaataaataaaaaatttataaatcgaatcgaaaaaattaataaaaatttttataaaaaaaatcgttaattttttttttttcgaataaatcgaacgtttaatttttttttaaattttttttttttttttattattaaaaatacgattatatataaaaaatatatcgattttaattaaaaaaaaaaaaaaaaatattattttcgtatttttttttaaaaaaaaaaaaattttaaattaattaaaatttaattattttttaaatattaattttttaatttattaatttataattttttttaaatattaataaaaatatattatatataattcgtaaacgtatatttatattttatttacgtttcgatttaattaattatttaattttatatataatttatttattttttaaaataatttatatttaatatataatatatattttttcgaaattttttattttatattattttacgatataaaaaataaaaaatattttttttatttttaattttttatttaaaaatattttaaataaatttttttttttttttattatttttaaaaaaaaaaataattcgaaaaaaaaaaatacgtatataatatatacgttatttaaaataaattattattcgttaaatttataatttaacgtttaaatattaaataaatataataatttttaaattcgatatattatataatttaattttaaaaattataaattatttttatttttaaatttttatcgtaaacgcgaaaaataattaatcgttatattaaattttattataaaacgttttttttttcgttttttttttaaataatattcgcgtttaaatttacgaaaataaaataaatatattttttattaataataaaaattatcgcgtttaaatattaacgaaaacgaaaattaaataaaaataaaaataaaaacgttcgaaatataaaatttttaacgaaaaaaaaataaacgattttttaaaataaatttttaattatttttttattatttttttaaattaattataaaaaattcgaaaaaaaaaaaattattaaaaaaaaaaataatttaaaaataattatttaatcgtataaaaaataataaaaattaatttattattattattaataaatattattttataaaaaatcgataataataaacgtaaaataatttataaatatataaacgaaaaaaaaattttaataaattttaaaacgattaaataaatt

SEQ ID NO: 241 - DNA, 3460 bp, Artificial Sequence
  chemically treated genomic DNA (Homo sapiens)
taagagtagaatattagtaataataattagtttaaaaaaataaatatatattaatataaagaatagtataaggtaagtaaatatttgggtttatattaatagatggtatttaaggatatggttagaatttttaaaatgtttaataatgtgtaatttttggtattaagttgttaatttgaatatggttttttaatatgaaatgttatataatgatagattttattatagtttgatttaaggtttttgaattttttaaaagggtaataaaatagatagatattgtatttttttattagttggtattggtggtatttttttgagtgttatttttggtattatgtgtagaggttgatagatttaagataatattaaatatgttagtagttattatatgtaggttgtttagtagaatgatagtgttttttagattttagaaagtatttagagttattgtatttattttttgggggttttgtagttttgtatttttagatgatgggagttgtaaatttttttgatggtgtttttttggatgtttatgaggtttgatttggtattatgattttagtagtaggtttatttaatggtagtaaaaatatatgttgtatgttgattagaatttggtaggatatatgtggaaagttaatgatattttggttgagaatttttgtgatatatattggttatattttgtttaattggagtttttatgtgttgtttttggtagagttaagtgaagattttgttatttagttatttttgaggtattgaagatatttgggtttttgttattataggataggttagaaagtagttagggttttataattaaggttttttttgaaatatataatgataatgttagttatttgattaaagatatttaatgttttaatttatttggaatttatttttgatgtgaagggttagtattatttattggttgggagtttgatttttggagttaggtagatttgggttgagtttatttttgtttgtttttagttgtgggtaaggtgtttgatttttttgagtatttgtggggtttgtttgtttttaaatttgaagaattgggataatttgtttttttatagaattattatgtagatgtaatatagttaatgaaggtaatatggtatataggaagagtataatatatgttagtttttattttttatggttagaagatgtggattaaatttttttttttatagttttgtgattaatattatttatgaaagaaataaatgaaataaatttttttttttgttatgaggggaatttatttgattttattgaattatttggtgttattgagttttttattgtttttttttgatttagatttttgggtgtgtgttagtaatatgattgtgattgttgttgttttataatattgtttgtggttagtttaaataagagtttaaaataattgaatgaaatggattttaaataatggtttttttatttttattttgtggtatttggttaaaggaagaggaaaagttttttgttaaagaaaatgaattagagaagaggtttagattgtgtttttgaaaatttttattgtagggattaagtttttttattttgaatttatatttgtttgtttgtagtttgattttatattttggtttggatgtgtggttttattggggtgttgtgtgtatgtgtggttgttttgtgggtgttagttttgattttttttttagatatttattgttttagttttaattataggatgtgtgttgagtagaaatgagattagttagtattggtaattgtagaggaatatgtatttttattagtgtttttgggttagagggtttgtttggtattgtgtattgggaaatttgttaaaagtggtgtaggttggagatgttttaggttgtggtggagttgtgtgtggtttttaaagtggagtggagtaggtttgtattttttttgttggggttgggatggtgtttttaggtggagaaagatttttgtgggttgtgtgtggttttttttttgtgaggattgttattggtttgggttggttttggaaagtggtggtggttttgggttgggtttggttttgggaatgttaggggtttttgggtgtggatgggtgtggttaggagggggttaaggtgtaggtggtggtggggtgggggtgggtttggtgggtgttttttttgggttttttgttaataggtgtgttttggttaggtggagatgtggttgtggttatgggtgggtgtgggtgtgtggggtggtggtgagggtggttggtggggttgggggtgttgggggggtgtgtgggttgagttgggtttgagttgggtttgtggattgagttgggagaggggttttggtttttgatgtgttggtgtgggaaaatgttggagatttgtttgaagttggtgggttgtaaatttaagaaggggttgtttttgttttttagttgttatttggaaggtaagtttgggttgtatgggttgggttgagtagttgtgtgtttttttgttgttgttgggttttttttaggttttgttgtttgtgtgtttttgtttgtgttttttttgggttttgttttttttttttttttttttttttttttttttttttttttagtttttttatattttgtttttttttttttttttttgtgtttgttttttttttttttttttgtttttttttttttttttttttttgttttttttttttttttgtgatggtttttaggtgttgttggtggagtgtggtttttagttttggtattagttttggtagagttatgttggatggtgatggtggtgtttggggttttatagtgtgggtttttttgaaaaagtttgagaaagttaatttgttaggttttaatatttttgggattttatgttgtggaatttttattgttaattgggattgtgtgttaaaaagattgatttgtgtttgtgaaaatatgtgatttttattaagtattatgtatataaggagtattattttattatttatggatatagaattttaagtgatttttttattttttttatttttattttatttatagattatgaagaggttttaggaatttgttttttttttaggggaggggagtttatttaagaaggtgtttttaaggagttttttagagtattggggtgttatgtttgtttttttaagtgaagtttagggttaggagggttttatttttgtgttttttttatttattttttttttttaattatatttgttttattttattttttttttttgttgtagtttttagttttataaatggaaaaaaagtaaattaagggttatgggtttttatttttgtagtttttaggtgggtatgaaattgatttgatttgagattggtgtttttagattattgtttttagtagaaaggttatttgtgttttagagatggagtggtatttggatttttttgttgtttttaattaagaat

SEQ ID NO: 242 - DNA, 3460 bp, Artificial Sequence
  chemically treated genomic DNA (Homo sapiens)
atttttagttgaaaataatagagaagtttaagtgttattttatttttgaagtatagatagtttttttgttgaaggtaatggtttgggagtattagttttaaattagattaattttatatttatttagaagttatgaaagtgaagatttataatttttaatttattttttttttatttataaaattaaagattataataggaaagaaaaataaaataaaatagatgtaattagagaaggagagtaggtagaaagaatgtaaaagtgaagtttttttggttttgagttttatttaaggaaatgaatatgatattttagtattttgggggattttttggaaatgtttttttaaatgggttttttttttttgaaaagagagtgaatttttaagatttttttgtggtttgtagataagatgggggtgggggagatggaaagattatttgaaattttgtatttataaatggtagagtggtgttttttgtgtatatgatgtttaatggaaattgtatgtttttataaatatgggttgatttttttaatatatagttttaattaatggtggaaattttataatgtgggattttagggatgttaaggtttggtgagttggtttttttaaatttttttgggggagtttgtattgtggggttttggatgttgttgttattatttggtgtggttttattggggttggtgttggggttgggggttatgttttgttggtggtgtttaggggttattgtgagaaagagaaagagatagagagagagaaaaagagagagataagagaagagaaaagagatagatatagagagaaagaaagagagatagaatataagagaattgaagagaagagaagagaagagggaagaaagaaaaaaaagataagatttggggagggtgtaggtgggagtgtgtgggtggtgaggtttaggaagggtttagtagtagtgggagggtgtgtggttatttagtttaatttgtgtggtttgggtttattttttagataatagttggaggatgaggatagtttttttttggatttgtagtttattagttttaggtagatttttaatatttttttgtgttagtatgttgggggttggaattttttttttagtttggtttgtgggtttggtttaggtttggtttggtttgtgtgtttttttggtgtttttggttttgttagttgtttttattgttgttttgtgtgtttgtgtttgtttatggttgtggttgtgtttttgtttggttgggatgtgtttgttaataaagggtttggagagggtgtttgttaggtttgtttttgttttgttgttgtttgtgttttaatttttttttggttgtgtttgtttgtatttaggggtttttggtgtttttgaggttgagtttggtttaaagttattgttgttttttaaagttaatttgggttaatggtgatttttgtagggggaaggttgtgtgtggtttgtggaggtttttttttgtttggaagtgttgttttagttttggtggggagggtgtaggtttgttttattttattttagaagttgtgtgtaattttattgtggtttggggtgtttttaatttgtattgtttttggtgagttttttagtatgtggtgttaggtaaattttttgatttgagaatgttggtgaaaatgtatatttttttgtagttattaatattaattggttttatttttatttaatgtgtgttttgtgattaaggttgaggtagtgggtgtttggggaggaagttagagttggtatttataggataattatatgtgtgtatgatattttggtgaggttgtatatttagattaggatatgaggttaggttgtgaatagatgggtgtgagtttagagtgagaggatttagtttttataatgagaatttttggaggtatggtttgggttttttttttgatttattttttttaatagagaattttttttttttttttggttgagtgttatggggtgagggtggggggattattgtttaaaatttattttatttaattattttaaatttttgtttggattgattatagataatgttataaagtagtaataattatagttgtgttattggtgtatatttagaaatttaggttagagggaaataataaggaatttaatggtattaaataatttaataaaattaggtaagttttttttatgataggaaaaggaatttattttatttattttttttataaatggtgttaattataaaattgtaaagggggaagtttagtttatattttttagttatgaagagtaagagttgatgtgtattgtgttttttttatgtgttatgttatttttattaattgtattgtatttgtgtaatgattttgtgaggaaatagattattttaattttttaggtttaaaaataaataaattttatagatgtttagagaagttagatattttgtttatagttggaaataggtggagatggatttaatttaggtttgtttggttttaaggattaggtttttgattagtggatgatgttgattttttatattaagaataaattttaagtggattaaagtattggatatttttggttaaataattagtattgttattatatgttttagagaaagttttggttatgagattttggttattttttagtttattttgtaatgataaaaatttgggtatttttagtattttaggaatggttaagtaataagatttttatttggttttgttaaaaatagtatataaaaattttagttggataggatgtaattagtgtatattataggggtttttggttaggatgttattaattttttatatgtgttttgttaaattttgattaatatataatatgtatttttattgttattgaatggatttattgttagagttgtggtattagattaggttttatgagtatttaagagggtattattagggaagtttgtagtttttattatttggagatgtaggattatagggtttttaggggatgggtgtagtgattttggatgttttttaggatttgggaagtgttgttattttgttggatagtttgtgtgtggtgattgttaatatgtttagtgttgttttgaatttgttaatttttatatgtaatgttaaaaataatatttaaaagggtgttattagtattaattagtgaaaaaatatagtatttgtttgttttgttgtttttttggaaagtttaggggttttggattagattataataaagtttgttattatatagtattttatattaaagggttatatttaaattggtggtttaatgttaagaattatatattattaggtattttggaaattttagttatatttttgaatattgtttgttaatataggtttagatatttgtttgttttgtgttgttttttatattggtatatgtttatttttttaagttaattattattattaatattttgtttttg

SEQ ID NO: 243 - DNA, 35962 bp, Artificial Sequence
  chemically treated genomic DNA (Homo sapiens)
gattatgttattagtgaataaaaatatttttatttgttttattttaattgggatgttttttattttttttttttgttttattgtatggtttaagatttttagtaatagaagattttagatagaggttaatgatttgggtttgaaattttattttgttatttattagttgtgtgattttgggtaagttaattaatatttttgtgttttaggttttttatatgtaaagtggagtgatatttagtttttaaggttgatatgaggattaaatgggataatgtttatatgtgaatatatatatgatttagtgtttggtatatagtatgtgtttaataaattggaatttttgttaatataagtatgtttttggtgggtgagaagggtggtagatgtttttattatttattttattgggtagtttttagaggatatttgaggtagttgtttgtattttttttttttagttttttttgatgtttatttttttttttttttttttttttttagatggagttttgttttgttttttaggttggagtgtagtggtatgattttagtttattgtaatttttgtttgtttagtttaagtaatttttttatttttttgttttagttttttaagtagttgtgattataggtatgtattattatgtttggttaattttttatatttttagtagagatagggttttattatattggttaggttggttttgaatttttgattttttaaagtgttgggattatagatgtgagttattgtgtttggttgatgtttattatttttgaattttttgaattagaggaatggatattttgagtttttagttttttttttgttttgtaggtggtttgttgggatgtatgtttgtggatgagtagaggaagttatggatagtggtaggttagttgttaggtatggttgtttttttataatatgattgttttaggatagttagattttttatgtgttagtttagggttttaaaggtaagtgttttaagagaattaggagggttgggtgtagtggtttatgtttgtaattttagtattttgggaggttgaggtgggtggattatgaggttaggagattgagattattttggttaatatggtgaaattttatttttattaaaaatataaataattagttaggtgtggtggtgggtgtttgtagttttagttatttaggaggttgaggtaggagaatggtatgaatttgggaggtggagtttgtagtgagttgagattaggttattgtattttagtttgggttatagagtgagattttgttttaaaaaaaaaaaaaaaaaaaaaaaaaaaaggagaattaggaggaagtggtatggtttattttgatttagtttttgaagttatatagaggtatttttgatatatgttgtttattaaagtagttagaattttgttttgtggtaggagaggatgtatagaatttatttttttttttttttttttttttttttaatatggagttttgttttttttgtttaggttgtggtgtagtggtataattttggtttattgtaatttttgttttttgggtttgagtaatttttttgttttagttttttgagtagttgggattataggtgtttgttattatatttggttaattttgtgtttttagtagagatggggttttattatgttggtgaggttggttttgagtttttgattttaagtgatttattggttttagttttttaaagtgttgggattataggtttgagttattatttttggttagattttattttttgattgaagaagtatgaaaatatttagggatatgtttaatatgattatagatattgatattgtttttaatatttttagaataagtgatgttttgatgagtatttttaggttgaaatttgtgtgtatgtttttgtttagaaagtttatgtagttggttaggtgtagtggtttatgtttatagttttagtattttgggaggtataggtgggtggattatttgaggttgggagtttgatattagtttggttaatatggggaaattttagttttattgaaaatataaaaattagttgggtgtggtggtaggtgtttataattttatttatttgggaggttgaggtataagaattatttgagtttgggaagtggaagttgtagtgtgttaagattgtattattgtattttagtgagattttgttttaaaaaaaaaaaaaaaaaaaggtttatgtagttatttttattattttattattttaatggaatatgaggtgaatttagtaggtagatgaggattgaattaagagttttgggttagagagtttttgttgtttttgtttttatgttttttagaatttttttgttagttatttttatttggagtttatttgttttttattttaattttttagggtttatggtttttttattttaaggtttatttaaatgttttttttgttaggtaagtttttttgtttgtttttttttttttttttttatttttgaatattttagtattttgatgattggggttttaaatgatttagttttgtggttttatagtatatagttggtgtttagtaaatgtttgttgaaaaagtttatttattaatttaatagagatttattgagagatttgttgttgttgttgttgtttgtttgtttgttttaatggagttttattttgttaattaggtttgagtggaatggtataattttggtttattgtaatttttattttttaggtttaagtaatttttttgttttagttttttgagtagttgagattataggtatttgttattatgtttggttaatttttgtatttttagtagagatagtgttttattatgttggttaggttggttttgaatttttgattttaagtgatttatttatttagttttttatagagttgggattatagatgtgagttattgtgtttagtagagagttgttttaagggttttgaaatttgatatggtatgttaatatggaaatttttgttttagaaataagaggtagggtgtgttatgtagagttgtataggaaagtattgggttggttaggaggtagagggaaggaggggtaaatatgagtaagagtttttattgtggtttttatgggaaggaatgggtgaggtaaggtaagtagttttaggattggttggtttgaataattgtagtaggtgttggggtttatataagggttttttttagttgtttggtgtttggttttgggatgattagggtagttggatattggttttgagtaagagagtttaataaaggaggtgtttgtgggtgtgggttttggattgggtggtatgtatttgtaagggattttttgggtgagttttttattatttttaggaattagttaattttggttggggtagtttttttgggaagagtaagtttttaagattttaaagtatttgagtatagaaaagtaaaggttttgggtatagtggtttatatttgtaattttagtattttgggaggttgaggtgggtggattattaggttaggagtttgagaatagtttggttaatatggtgaaattttgtttttattaaaaatatagaaattagttaggtgtggtggtaggtgtttaaaattttagttatttaggaggttgtagtaggtttaagaggagaattgtttgagtttaggaggtagaggttgtagtgagtagagattatattattgtattttagtttgggtgatagagtaggattttgttttaaaaaaaaaaaaaaaaaaaaaaaaaaagagtaaatgtatgtttaatataagggtttattatatattaagtatatatatgaaatgggtagtgaattaaatggatagtttgggtattggtggggtttatattttgtgggaagataggtgatgagtagataagtaaatttgtattttgtaaatatattgtattttttttaataaatattttatggttgttttgtgtgttaggtttggatttaagtattgatatatgatgaatagaatagataaagtttttgtttttagtaatgtatgttttagtggggggagattgtaattaatgaataaaaaaaaaaaaaaaaagaaagaaaattgaagtttaggtatggtggtttatatttgtaattttagtattgtgggaggttaaggtgggtagattattttaggttaggagattgaaataagtttggttaatatggtgaaattttgtattttttaaaaatataaaaattagttgggtgtggtgatgggtttttgtaattttagttattttggaggttgaggtaggagaatttttttaatttaggaggtagaggttgtagtgagttgagattgtgttattgtattttagtttgggtgataagattaagttttttttttaaaaaagaaagaaaagaaaagaaaaagaaaaattagtgataagaagtaaaataggattaagggattaaaaaaaaggattggaaagttattttagataaggtgattagggaagttttttttgaggaggtgatgtttgagtaagttatgagtgaggagaaggagttagttatataaaagtttgggagaagagaatttatgtagaaagagattagagtgaagggttttggagtgatgagaagtttggtgttgtggaattgaggggaagttagttagttttgaggtaggagaatagggtttggaggtagggaatataaggttgatttatattgattttttagaattaaattaaaaggaaaattttaattttttatgtttaagtaattaaaggattagaggttattttttttgtaattttagtttttttgtgtgtagatgaaaaattgaaagtatttttgattgttttttttttattattagttaggttggtaggtggttaagtttttatttgtatgggagtataattttgtaattttattttagtttttgattgataattttttatagttaattagatattggtgtagggtgtaatttttaattttagtttttgattggttattttttataattaattagattgattatgggttatttttttatttatatagggtgtatattaaataattaatgggaaatttttagagggtatttaaattttagaaatttttgtaaggagtttgttgagtttttttgtttgagttgtttttgttttgtagagtgtatttttgtttttaataaatttttgtttttgttgttttattttttttttgttttgtttgtatgttttgtttaagatgttgagaagttgggtattttttattgttaatagtttggttgtagtatagtgagtaatgtagtgggttaggatgagtgtgaggttagagataggtaggagttaagaagtgttggaagtagagaagtgatttaatttgtttttaaagttttttttggttgttgtgtggagattggatgataggaaggataaaagtagaattaggaagataagttaggaggttatttttttggtaagagatgttgttgattagtttggggtagtggttgtggagatgtatagatgtgtggtattagtgaattttagattttttttgttattgaaattatatagggagttaaaatatgtatagatttttggattttatttttgtagagttttgtgaaaggtaaataaattttggggttttaaaattattaagttaaagggaaaagtaagttaagttgggaattgtttagggtaaatttgttttttgttttatttaaagttatttttttgtttattgagataaatgtatatttgattgttttttttggagatgttaattagaaattaaaaatataaaaaatgtaattatttgttttttttttttttttttttttttttttttttttttgagatggagttttattttgttgtttaggttggagtatagtggtgtgattttggtttattgtaaattttgtgttttgggttgaagttatttttttgttttagttttttgagtaattgggattataggtattagttattatatttggttaatttttttttttttttttttttgtatttttagtagagatggggttttattgtgttagttagggtagttttgattttttgattttgtgatttgtttattttggttttttaaagtgttgggattataggtgtgagttattgtgtttggttttaattatttgttttttatttatttattattaggaagtttttttttagttttgagttgtttagtttttttagattgaattaatatttattttatatatgttgattgatgttttatgtttttttaaaatgtataaaattaaattgtgttttgattattttgggtataggttgttaggattttttgagtttgtgttataggtatatttttaattttggtgaaataaattttttaaattaattgagatttgttttagatatttggggtttatagatttaatgtttaaggaatttatattttttataagttttttgggatgtgttgttttgtttttgggtatttatttgtttattggttgtaaaggggtaagtgtggttgggtttggtggtttatgtttgtaattttagtattttgggaggttaaggtgggtggattatttgagtttaggagtttgagattaggttgggtaatatggtgaaattttgtttttataagataaatataaaaaattagttgagtttggtggtatgtgtttgtagtttaagttatttaagaggttgaggtggtaggattatttgagtttaggaggatgaggttgtagtaagttataattgtgttattgtattttagtttgggtgataaagattttgttttgaaaaaaataaaaataaaaaaaggtgtgtgtgatgatgtagaaagaggagtattggggatgggagagggggagtttttgttgttttggattttagttttagttatgggtttgtttggggggtttggtggttttaagtgattattagggatagtaatgtttattttgaagatgggttgaaagtgaggaatatataatatagtatttgtaaagtatttagtaaaggattagttgaagtatttgggttatttttggtaaagggtgtaggttttggggtaaattgtgtgtagttggaatatatattggttttgtagttatttgttaatgtgaattttattttttttggggttttgatttttttttttataaattggtatttataatgttaattttgtgaatgttgtgagaatgtgtggggtaaaggtgatgttttttttttttgggaagaatttggatggtgttaggtttatatttttgttttgtttagggttgtttgttgggtttggttttttggttgttgggttatgtgagtttagaggatattattgtttttttatggttgtggtaggattggattgaggggttgggttttagtgtttttttttaggtatggtagagggtgagggtttggtagtttgtttatttagggttttggggtattagtatttatgttattgattgtttggtagggttggtttttttaagtgtggttgtgagatttgtttaagtggaagaaatgttgttgttttggagatttataaaataattggtttgatggatttttttttaggaggtggatttggtttattggttttattgattatagttgatgttaatgattttatttaattgtttttagagtttttgtgtatggggagttattatttttaattagttttttgtgaatgtagggtaaggagagggagagggtagtgggggatggggagaaggggtgaggggtatttttttattaaaatggagttgtagaaaaatttatagagatatttgtttgttttttgttgagtttttagaatagtgtttggtatatagagagtgtttaatttgttgtgtaattaaatgtaagttaagatttttgtattgtgtgtgttttttttttttttattaaatatatttggtttgtaaggtttgatttgtttttttagatgatttttaatttgtttttaaaagaaatattggagtaaattagtttgtttaaaggagtttttatgaaaggatagaattaagtgagaagtatttggagtttggtttggggttatagatgatgatgttgagttagtatttatggggtggttgtaatgtagaattttggtgttattgggaattgtgtggaaaggggtttttttttttgtttaaatagtgttttttgtagattttatttttttatttttttgagtttttttttataaaatattggattttagtagtttagaattggatagaaatttagaggtttgttttttaattatttttaattttggtaaataataaatgggatgatgagtataagatagttttggtaaaaagttatatgttatataatgtgagattttattattttatgggtgtttttttgttaatagtagatatggtagtttggtttttttttttttgggtttgttttattgttgttaattgtaaatatggtttttaggttgtgagtttttattggtagttgttttgagtttttgtttttttttgtttttttgaatgtggtttggagttgtggagttggatattgtagtttttgattgagttgtgtttgtgtaatttattggtgttaagatggtgatggagatgaggtttttagtggtttgtaagttttttagtgagagattgggttgtgatattaagaaatatttagtggtgttgggggatataattattatggatataggatttatgtggtatgtggggatttgggggagttgaggttttagagagtggttttagggttttttgtatgtggtttaggttttgtatttttgtgtgtgtaattttttgtgggatttagggtattttgtttgagtattttatatattttgtttttgagttttgtgttttttgttttttgtattttgtgtgtttttgtttgtatttgttttagttttttgaaattttttatttttgatttttggtggttgtgatttttgggttttttgtttgaagtttaaatttttgatttttttttgtgggagatttggaaagttggggagggttaggtgtaggtttttttttagtttttagttttttgaggggatggtgggtgtttttggttgttttttttttagtttagaatttgtaattgtttgattttagggtaaatagttatattgtgttgtatgtatttatttatatatattttgaatttaaggggtgtagtgtagtgtattgtggttaagagggaaggtttttgagttagatagttggggttttggttttgttattattatattttattagtggtattgtttttttatggttagtttttttatttgtaagatagtgataataatagtatgatatggtaatgaggattaaatgagataattatgtaagaaaagaagtaaaattagttattatattattatagataatattagtgttttaatttttattattattatttttttatttgtatatgtataaggggtatagtatttatagtattgttttttaatttgttagtttaaggttagtggatattaggaaattttttttttttttttgagatggagtttgttttagattagttgtgtgattttggtttattgtaatttttgttttttgggtttaagtgatttttttgttttagttttttgagtagttgggattataggtgtatgttattatgtttagttaatttttggttttttttttttttagtagagatagggttttattgtgttggttaggttggttttgattttttgattttaagtgtgatttgtttgttttggttttttaaagtgttgggattataggtatgagttattatgtttggtttttaggaaattttaagatttatttttttattaatgtttttaatatatattttgtgtagttgggttattatggtagagtgaaaaatttttgttttggtggagttttaatagggagagatagataataagtgtaatgaataagttatttagaatgttaggtaataatgtaatagggaaaaaagtggagtagggttaatggtatgtggggggaatggtggtaatagggtgggttgtgtttttaatggtatagttaaggtaggtttgttgtagaaagtgatatttgagtagatttgagtgagaggagtgatgtttaagtagttgtttggagaaggagtattgaaggtagagggagtagttagtatagaagttatgttttgtagggggagtttgttagttttgaggaatatgttgtttttgaagggagagaagttattttgagttatttttgtattttttttttgtatttttgttttgtattaggggttatggaatgtatatgggagaagagaagtttattgtatttgttgttggttttgtggagagagtaaataagttgatttgtgtgaaagttttgaaaattaggtgagaataaaaggtgtgtatttttttttttgtagtattaggttgtataattaggttttttttgttttttttttattttttattttatttttgtttgttttgttatgttgtaagtttgaggttttgattatgattgtaggtggggtggtgtagattagtgtaggttttagaggtttttttatgttatgttattattttaagttttggttattttttttgtaaagtgagtataatagtatggtttattttataggattttttttttttttttttttttttttttttgagatggagttttattttgttgttgaggttggagtgtagtggtgtgattttggtttattataatttttgttttttgggtttaaataattttttttttttagttttttgagtagttgggattataggtgttttttattatgtttggttaattttttttgatttttagtagagatagggttttattatgttggttaggttggttttgaattgttgatttttgatgatttttttttatttggttttttaaagtgttgggattataggtgtgagttattgtgtttggtttaggattttttttagaatttagtgagatggtgtttgtaaagtatttagtatagagtttgatatttagaagtatttaatgaaggttagttttagaaagtaagttagtggggttggaatagagtgagtgagggggagagaaggggtagatgtaagtagagagttgaggtgggtgggtgtgggtttgttttgtagttagagtaagtattttggtttttattttgtgtaatttgggaagtattggaaggggtggagtagaggagggatttgatttggatttaagtttattttggttgttgatgggagattgaagggggatagggtaagtttagggaggtggattagggattatatttatgatttgaagtgatggtggttttaattaaggtgggagtagtggaaggtggaggagtgattggaatttatatagattttattttttgagtgtttttttaaaattatgaaaagttgttgggttttgtattttttgggttttattgtgtataggattttgttaattgtgaatagaaataagtttatttttttttttttaatttggatgttttttattttttgtatatgttttaagggtagagttaataggttttgttattggatttgttttggagtgtgagagagagagaggaattaaggaattttttgaggtttttggtttgagtaattgaggggatggagttattgttgattgagatggggataatttattttttattttggtttgttatggaggattggagggggttgtgggaaagtttagttttgtgtttgatatatttgaaaatgtttgttagttatttagatggtagagttgggtagttagtagttgagtaggatttggaatttaggagagtggtatagttatagtatagagtggtgttttaaaggtattagattgagtggttgaaaagtgaagaggtttaaggatttagttttagtattgagtatgttttattagaattgtgggtaaggaattagtaaaggggtttgagaggagtaggtagtgagtaagtggaggagatgtgagtagatttgtgtggttggagttttggtttagattttttttttttttttttggttggtgtagaatttatttatgtgttataggaaaatagtttgtgttttttattgttgtgtaattgaataaaatagggtttttgggttaaatgaattatttggaatggtgatatgtttaaggatagttaatggagattttatatgtggaggaatgtttgaagttagtagtttttgaaagtaagtttagataatatagttatatgaatttgttgaatgtggtgtttgttttaggtttttattttgttgaattgatattttaaatggtgtgtggttttgttagaaagtttgtttatagatggatgaattttttgtgttttgttttttagatatattggtgaagtaggagatattgtagtgggatgaattatagaggtaatgttgatattagattggtgtttataaagttgaggtaggttggtgattttatttatgggatagttattttatttgtagttatatgaaaaaggtatttattgtatttggttgttgtgtggtttttgatgtaaatatgtggtttgtttgattttagattattggtttatgtttttttttttttgagatggagttttgttttgttgtttaggttggagtgtagtggtatgattttggtttattgtaatttttattttttaggtttaagtgatttttttgttttagttttttaagtagttgggattataggtatttgttattatgtttagttaatttttgtatttttagtagagatggggttttattatattggttaggttggttttaaatttttgattttaagtgatttattagttttggttttttaaagtgttgggattataggtgtgagttattatatttggttttattggttatttatgatatgatatatgaatatggagtatgtgtttaggtgtggaatttggtttataggtttaatagaagaggtggaaggtggagattaattttaggttggatttggttttgttgtttttgtttatgaatttttttggaggagagttggtaagggttatagttggggttatggattagggtttagtgggttggggggagttgtgggattttttgttttattagaggattttgatttatattgaggttgtttttttgatttttgtttgtttgttgtgaagtttgttgtttagatgtgtatgtagattttttattttgtttaggttttttgaaagagggagtagttggtatatggtaggattagaaatatttatggggtgggattttaatagagagttggggagagaagtttttagatgttggttgttaatagttttttttttggatataatagttttgtatagtgaagatgttttttgaaaagttgtttttatattaggtttttgtgaattgaaaggtattttatttaattatgtgtggaatgtggttgttggtattttagataattatagtaattaagttatagttttttgtaaaatgttatggtttattttgatttttagtttagtgtgtatttatagagaggtttattgtgttaagttttgtgttgagtgttaagtatgattgagttttttagtaggggatataagataattgatttagtttttggtagtagaagaataaataagttgtggttatataaaaggaaattttagtgagagaagtttgtaggaaagataggtattggagttgattttggaaggatggagagattttgaatgattagtttagggaatttgagataaagggaaatgtatgagtagagatatatttaagtaggagttagtttggttttgttggattatagagggttgttatggaagatgattatggaaatgttggttaggtgagattgggaggggtttgaatgttttttagagaagggagggaaagaggaagaggagttgtggaaaagttttttgagatggaaagttgtgattattattgattttttttaagtggtttgggttatttatttttgttatagtttttagtgtttgaatattgtggttggttttaaatattttaaaaggaagtgaaagagaagtgatggagatttttttgaggatttggtttaagtaatgttatttttttgtgtattttagaggagaagatttgtagaagatgagtttgtaatgagaggttttttataggaaggggattttattagtgtattttgtgttttgtattttagttttttgatgtttttttgtgggattgggaaatgggttttttattgtatgtttttgatggaagaattatgttatttttgtagggatttgagttttagattaagtgttgggttttgttgtatttttttttagtttttttaatttaggttgattttttagtttttgttgggatttgttgttaagttatttttttgggttttgtaatttatggtggtttgtgttttagattaggtttttgttaatggtgttaatttttagtgtagggagtggagaaggtgttgtttatgttaagatattaatgataggttgagtgtggtgatttatgtttgtaattttagtgttttggaaggttaaggagggaggattgtttgagtttaagagtttaagattagtttgggtaatatagtaagatttttttttttataaaaaaattaaaaaagaattagttgggtgtggtggtatatgtttgtagttttagttatttaggaggttggggttagagggttgtttgagtttaggagtttaaggttatagtaagttatgattatattattgtattttagtttgggtgatagaataagattttgtttttattttatgttattttttaaatttttttttttttttaatgatggagttttgttttgttgtttagattggagtgtagtggtgtgattttggtttattgtaatgtttgttttttggatttaagtaattttgttttagttttttaaatagttaggattattggtgtgtgttatgtttggttaatttttgtatttttagtagagataggttttattatattggttaggttggttttaaatttttgattttaggtgatttgtttattttggttttttaaagtgttgggattatgggtatgagttattatgtttggtttttgtttttattttatttatttatttatttatttatttatttatttatttatttttttgagatggagttttatttttgttgtttaggttggagtgtaatggtgggattttggtttattgtaatttttgttttttgggtttaagtgatttttttgttttagttttttgagtagttgggattataggtatgtgttattatgtttgattaattttgtatttttagtagagatggggtttttttatgttggttaggttggtttagaatttttgattttaggtgattgatttgttttagttttttaaagtgttgggattataggtgtgagttattgtatttggttttttgtttgtatttttaaaaaaaagatatttatgataattaaggggagaggtaaggttatagtgatgtgttttgggttaaagattgttgagtttggattattggagaggggaggaaaagatggaggtgtggggttaaggggagaggttgtagaggataggatagtgtgtggttaaggttgttgtttgtttttttattattttggttaggttgaggtttaggtagtgttttttgatggagttgtttttttgtatatgaggagtttgaaatatggaaaagtaagttgggtttttgatgtttttgtttgttgattgagattataaggttatttttgaatttttatagttttttggaattttggtttaaagaattttagtagttaagtattaatagaggttggtattttataaattgattgtgttttttaaatgtaatattaggatggttagggtttatagggttatgggttagtagttttgtaaagaataagttttattttttttttttaaggagattgatttttattagaagagtttttttaattgtgggttgggaggtgtagttgtttttttttttttagggggtgttgtagtttagtattggggttgaggttgttttgggaataaaggtaggttgggtttggttaaatagtttttagataaatgtttaattagtttagtggatgttattgttggtaaagtttgttttgttatttgagtttttaaatggaattttattgttttttttgtatgaggttgtattattgaagttatttattattttaaggagagtatattttttaaaataaattaggatttattagttttttagttttatttgggtgaatgtttttattttttgagtggaataaaaatttttttttttaatggagtggttgtagatagttatgttgatgtatatggagtaggtagaggattgttgtagtatgttgatttttataattttgggttttgtggatttttttttggtaggatgtggatttgagttgttttgttaggattagatatggatttgtatttagttttatttatttttttatttatttagaggtatatattttataggtaagatgagtgtttggggtttaggtatgagttagggttatggaataatgtagtgtttttgggttagtaggaggttttagtttatttttttattggttttagtttttttaatgtttggtatatgagttttggtttagagtgtaaggaagattgtaaagggaaatgatagagaagagtattgaaggttattttttgttgggatgtatgaatagtttttgagttttaaagtgttttttgtaaaaatgtgtattatgtgtatgtatgtaggtgatagtaattataaataggaaggatattaatttgaatatatttaggatgtatattttgtagttttttttttatttattttgttaattttgtagtgatttagttttgtgatatatttttttagttaggttagggggttttggtttaggtttttttttttttggtgaaatggtagaagatttatttttatgatttgttatgtggtgttttagtgatttttggtaataatggttttatttggatttatttaatatttgagtataaagaagaggaagtagggggttttattgtaaatttggaggtgagtaaatattgtggttatttttagtgggatggagggggtttagtttttgttgtgtttttgtggttagtgaagttggttgtttttagttatgttattggtgtaggttgagttattttgattttttattatggtatgtttatgaagtttatattatttttttttttaaggagatgaatttagtgaatggtttggtgtttgttggtggaggtggtaaagttgtagggtaatagttgaagagttagtgaagaagttattttttttttgtttttttgtttgtttgtttgttttgttttgttttgttttgagatggagttttgttttgttgtttaggttggagtgtagtggtgttattttggtttattgtaagttttattttttgggtttaagtgatttttttgttttagttttttgagtagttgggattataggtgtgttttattatgttttgttaatttatttatttttagtagagatggggttttattatgttggttaggttggttttgaatttttgattttgtgatttatttattttggttttttaaagtgttgggattatagatatgagatattgtattttgttttattttttttaattttttttggaattagttgtttggttgatttggagttttagggtgatattgtttgagttataaatgatttatttgtgaatttttgtggttggttatgtattttggttttgtttgtatttttttttttttttttgtgtttttttatagtttgttttttttgttgattgagaggtgatattttggttttggaattgtattattttgttggtaatttagaggatgatgttgtatgatattagtattttgtattgttatgaagtattttttttatattaggtattttttttagggttttttttttttttattgatttgtgagttgttttgttgtttgtttagagataatatgtatatttttttaatatttttttaatatttgttagtatgaattggtttgaaatagttttaatgagtgtttggtagatttttttttaagaaatttgtaatatttttaatgtttagtgttagtttaaggattttggggtaggaggtgttaggtgggattagtttatgagagtaatttttggattatattttattttttttaaattttagttagtttttggatgaatgttagaataatatttttgtttttgttgattatattttagagtattttgttgatttattaggttgtttttagtagattatattttgtaatgtttagtttttgagatatgaaaggaatatagaaagtttatgttaatggtttgatttatgtttggattggtttggtggtttgtttatggttggttttttttttgaataaatgtttttttttttttttagattaaagatattttaaagttagaaataatggaggagattgtgatggaaatatgttagaggtttttggaataggagggataaggaggtgttttagaagtatgggattgtggattttgtaggagtgaagattgtgatgtgtggtttttatatgtggtttagtaaagatttgagagattatttttttgtttgtattgatggttttgtgatggtttttagtttataggtttgtttttttttgttttaatattaagtttgggtggtagatgaatagtgtttttttgggttgttagttgagttttggtattagggaatagttttagtttttttaaagtgtatagtgttatagttgaatgggtttttattttggaataatatggagaattttttgttttttatttattgttatttataaggtatagtgttttatgaaattgttttaatagaaaatatggtatttttgatttttaaatggtttgttttggtttttatttttatattttttaaatgattgagaatgtagttggtaaagttggaagaataaagttaattaagtaggttaggtatggtggtttatgtttataattttagtatttagggaggttaaggtgggtagattatttgaggttaatagtttgagattagtttggttaataaggtgaaattttatttttattaaaaatataaaaaattagttaggtgtggtggtgtgtatttgtagttttagttatttgggaggttgaggtgggagaattatttgaatttgggaggtggaggttgtagtgagttgaaattgtgtattatattttagtttgggtgatagagtgagattgtgttttaaagaaaaaaaaaaataagtagttttttgtttggttggaatttgattttttgttgtgtgttttttgtagttatagatgtgattatgtttatattgggttgttttaatttgttttgtttggagagtgatttgtaagatgttgaattatttatgataatatagtgaatgttttgggtttatgtatttagataaatatgaagaaaataagtaaagaaaaatggagattgggaaagtaaagttgtttttattttataattgaagtagtgtggagtattaatttgtggatgatttagagttaaaagataaaaagatgttagagtttttgttgaagaatgtgagaatttttgtgtattgttttttttgatgattatttaaaaatggtgttttgatgtaggtttgggggaatatttttaaaaataagggtgttatgtgtttgtaatttagtattttgggaagttgagtgggtagattatttgaggttaggagtttaagattagtttggttaatatagtgaaattttgtttttattaaaaatataaaaattagttgggtgtggtggtataagtttgtatgtagttagttatttaggaggttgaggtatgagaattgtttgaatttgggaggtggagttgtagtgagttgagattgtattattgtattttagtttaggtgatatagtgagattgttttgaaagaaaaaaaggaaaagaaaaggtggttggatgtggtggtttatgtttgtaattttagtattttgggaggttgaggtgggtggattataaggttagattgagattattttggttaatatggtgaaattttgtttttattaaaaatatagaaaaaataaattatagtttggtatggtggttggtatttgtagtttttattatttgggaggttgaggtaggaaaatgatgtgaatttgggaggtggagtttgtagtgagttgagattgtgttattgtattttagtttgggtgatagagtgagattgttttaaaaaaaaaaaaaaaaagggatattatatgtaagtgttgtttttatatatgtggtaaatttgtttgtttgtttttgagatagagtgttgttgtgttgttaggttggagtgtagtggtttgattttggtttattgtaatttttattttttgggtttaagtaattttgttttagttttttaagtagttgggattataggtatgtgttaatatgtttagttaatttttgtgtttttagtggagattgttttattatgttgattaggttggttttgattttttgattttgtgatttatttgttttggttttttaaagtgtttggattataggtatgaattattgtatttagttatattttttgatatttatagatgttttttttttttttgtttttttgagatggagttttgttttgttattaggttggagtgtagtggtgtgattttggtttattgtaatttttgttttttgggtttaagtgatttttttgtttaagttttttgagtagttgggattataggtatgtgttattatgtttaattaatttttgtatttttagtagaggtggtattttattatgttggttaggatggttttgattttttgattttgtgatttttttgttttagtttgttaaagtgttgggattataggtgtgagttattgagtttagttatagatgttttaatattattgttttttgtttttttgttttgggtaataataaggagttgaggatagttgaggaagggtttggttgataaaatgttttttgatagagttttaattattttatgtaaatttaggatagttttaatggtagtaattttgaatattgtatttgataatttttaaatataatttggtttttttttattaaatggtatgtttttttataataatataataaataattttttattttattttttttttttgagatagggttttattttgttatttaggttggagtggggtggtatggattatagattattggagtttttattttttaggtttaagtgaatttattttagttttttgagtagttgggtttataggtatgtgatgtattattatgtttggtttttttttttttttttttttttgagatagggttttgttttgttatttaggttggattgtagtggtataattatgttttaattttttggttttaattagtttttaattttagttttttgagtagttgggattataggtgttgagttattatatttagttaattgtttttgttttttgttttttggtagagatgaagttttattatgttgtttaggttggttttgaatttttgattttaagtaatttttttgtttaagttatttttttattttagttttttagagtgttgagattataggtatgagttattatatgttgtttattttttttatttttatgaatttttttgttgttgtttaggtttaagtgatttatttatttttgttttttaaagtgttgggattatgtgtgtgagttatagtttttggtttttttttttgttttttttattttaagttgtattattagttttggggagtttgtagataattgaatattttataggttgtgttgtagttttagatggattgatttgttatgtttttgaggttatttaggttgtatatttttggagagaagggaatggtaaagagtgggagtttgagttaagtttggttttgtttttttaagagataaggtttttgtaatttaggttgtagtatattggtatgattatggtttattatagatttgggtttagttaatttttttgttttagttttttgagtagttgggtttggttttttttagggttatatgttagtttatttattttttttatttggtgttttttagtttgttagtttatgttgtttatttagtatttgttgaatggtgattatttattaagtggaattaatataaaattgtttatttaaaagtaattattggtgattatttttttgtagtggtttattagagggtgttattgttaagtgtaattttagtaggtgttttgtgttttttttttttaatggaataaattgaaatttttatatggtattgaatttttttagtaatttggggggttgttttaattgaattatttttaatgaagatatatgaatttgaagggatttatttaatatatgataatattatttaatattatttttttttttttttttttttgagataaagttttgttttattttttaggttggagtatagtgatgggatgttagtttattgtaatttttgttttttgggtttatgtgatatttttgttttagttttttgtatagttgggattataggtatttattattatgtttagttaatttttttgtttgtttgtttgtttgtttttttgagatggagttttattgttatttaggttggagtgtagtggtgtaattttggtttattgtaatttttattttttgggtttaagtgatttttttgttttagttttttgagtagttggaattataggtatgtgttattatgtttagttaattttgtgtatgtttagtagagatgaggttttattgtgttaattaggatggtttttattttttgattttgtgatttgtttgttttagttttttaaagtgttgggattataggaatgagttattgtgtttagttgaatttttatatttttagtagagatggggttttgttatgttggttagtttgtttttgaatttttgaatttaggtgatttgtttgttttggttttttgaagtgttgggattataggtgtgagttattatatttagttaagtaatatttatttttgattgttaggtatttgttaggttttggattttagtttttaagtttttaatagtattatttagggtttatgtttttaggattttttgagattgtgttttggtttttaaaaaaagtattattttatagtattatataggtatttttaaagtatagtgtattggttgggtgtggtggtttatatttgtaattttagtattgtgggaggttgaggtgggtggattatttgaggttgggagtttgagattagtttggttaatatggggaaattttatttttattaaagatataaaatgagttgggtgtggtggtgggtgtttgtaattttttaggaggttgaggtaggtgaattgtttgaatttgggaggtggaggttgtaatgatttgggattgtgttattgtattttagttggggtgatagagtgagattttgtttttaaaaaaaaaaaaaaaaaaaaaatatagtgtatttttagaaaaaaatattagagtttgggtattgggtatggggtttatttaaaataagaaaatggtaaagtggaaaattagggataaggttttagattaggtgtagttgatttttgttgtgatttttaggaagtatagttttaatttttgtggaaaattaaatgagatttagtttgatttttatgaattttgtttttataaaataataataataaaaaaatgtaggtgtggtggtatgtttttgtagttttagttatttgggaggttgaggttagaggattattagaatttagaaagttgaggttgtagtgagttgagattgtgttagtgtattttagtttggttaatagagtaaggttttgtttttaaataaataaattaaattaaataaaaaatttaaaatttttgtaaagtaagttatgatttttatttatgggtgaagaaatgaatttagaattaaagggatttgatgaagtttttttgaattgtgaattaatgtagatttaagttttagggaggtgttataatgtagttttttagaggatggattggattgattgaaagtttatggatttagaaatttaattttagtattgaggttgattttttgtttggattgttattttgtttattgtttatttttttatgtaggttttatgaggataagggtgggtttttttttttattattgtgttttagtatttaaagtagtgttttatatatagatgtttaataaatgttttttaagtgaattgttatttattttttgagatatggtttttgttttttagattggagggtagtggtgtaattttagtttattgtattttttgttttttagatttaagtaatttttttgttttagttttttaagtagttgggattataggtatatgttattatgtttggttaatttttgtatttttagtagtgaggggttttattatgttggttaggttggttttaaaatttgtgattttaagtgatttatttgttttggttttttaaagttttgggattataagtgtgagttattgtatttggttatgaattgttagtttaaaaaaatgtgtattaggggttttgatttgattgtttaattttaagttaaattagagaataaagtatgtgtgtggtggtttatatttgtaatgttagtattttgggaggttgaggtgggtggattatgaagttaggagattgagattattttggttaatatggtgaaattttgtttttattaaatatgtaaaaaaaattagttaggtatggtggtgggtttttgtagttttagttattttagaggttgaggtaggagaatggtgtgaatttgggaggtggagtttgtagtgagttgagattgtattattgtattttagtttgggtgattgagtgagattttgttttaaaaaaaaaaaaaagaatttggagaaaatgattaaagtatgaatgggaataaaaagaaagtataatttttagaaggaataattaggatataattaggataagataatgggtaaataggttaagtataatggtttatgtttgtaatattaatattttgggaggttaagagggtggattatttgaggttgggagtttgagattagtttggttaatatggtgaaattttatttttataaaaatatagaaattagttaggtgtgtggtatgtgtttgtaattttagttatttgggaggtaggagaattgttttagtttgggtggtggaggttgtaatgagtagagattgtgttattgtattttagtttgggtaatagagtaagattgttttaaaataaataagtaaataataaataatgggtaaataaagtagaataagggtatttatagttgaagaatgatattatagattagaattaagattgttagttagataattttgtgagagaataaagttaaattaaattatatttgaatttataaattttagttttaaatttatgtataattttttatgttttttattttgtattttttaagtaattaattttttttgaaattagtattaaaaataagtgttattttttaatgtgatagaaatatttttaaaatatttaatataatagttgaatgtataatatttattgtgtagttgtttttttgatattagtagtaatttgtgaaaaattagtggttttagattaataggtttttgatattgaatggtatagtgggaattatgggttttggagtaaggttagtttgggatgaaattgtgattttgttatatattggttaagtgattttgggtaggtaagttatatttttgtttttttatttgtattatggggaatagtattatatgttttattgggttatagtgaggattatatgagataatgtagtttatggaaagtgtaaatagtgtttggtgtaaagtaggagttgtgataagtggatttttttttagaaatgggattttgggttaggagtagtggtttatgtttgtaattttattattttgggaggttaaggtgggtggattgtttgaggttaggagtttgagattagtttggttaatatggtgaaattttgtttttattaaaaatataaaaattaggtatgtgtgatggtgtatgtttgtaattttagttatttgggaggttgaggtaggagaattgtttgaatttgggaggtgaaggttgtagtgagttgaaattttgttattgtattgtagtttgggtgataagagtaaaattttatttgaaaaaaaaaaaaaggaaagaaagaaggaaagagaaggaaagaaagaaggaaagagaaaggaaggaaagaaagaaagaggaaaaaaggaaaggaaaaggaaaaagaaaagaaagaaaaggaaggaaagggagaaatgggatgtttgttaggtgtagtgttttggggaggtgtggagagtttataatagggattaaggtgttttttagttgtagaatatggattatttgttaggtgtggttttggtatatttaggttattggttttgttgatttgttaaatttaattatttgggtatttttttggttaatatagaggatgtttttatgtgaatatgtgtttatttgtgaaatgtttataatgttaaaggtttgttttggggtaaatatttgatagtgtttggtaaatttaataaatgttttttttgtaatgagtaagttttttaatgtttaaagaaatagttgaatttgttagtaatatgttggatgttttttttatgtttgtatatttttttgttagtttttttttttttttttttttgagatggagttttgtttttgttgtttaggttagagtgtaatggtgttattttgttttattgtaatttttattttttgggtttaagtgagttttttgttttaatgttttgagtagttgggattataggtatgtgttattatgtttggttaattttgtatttttagtagagatggggtttttttatgttggttaggttggttttgaatttttgattttaggtgatttgtttgttttggttttttaaagtgttgggattattggtgtgagttattgtgtttggtttgttagttttaatatttatgttttttggagggtgaagggtttgaaaggtattaaaaattttggtttttaggagtgagttaaatttttttttttagagattgaaggaggttatttgattttgtttttaggaaaatttaatttgtaattttttttttgttttggtttttttaggttttattatttgtgttggggagatgtggtttggtttatgttaggttggtaagaatttattaggttttaggagggtggggttgagttttagaagttggggtttgggttaggagttttggtgtaggtggatttgggtgtgtgttatgggattataatttttggtatgtattgtggattgtgttgaatatggttggttgggagatttaattttattgtttttattggttaatgggatggaggaaagaggtttgatttggatttttggaggttaatggtaatatagaggaggtgggtgtttttttattatttattttgtgtttagagaagttatatttaaaaggttgtgttgggttgggtttttgtaggtagtgggattagagttgggaggggtggtggtgttttgggaaagtggtttttggggtatttgggtttttttgaggtgggttttggatgttgttgtgggtggggttgagggtggggtttggttttgttgtggagtggtttgtaatttattatggtggttgtggggtttggtgtttgtgtttgagtagtgttggagttggagttggtttttgggttttgtggttgaggagtttttttgttgtttatggtttttattggtggggggtggttgggttttttggtggagtttgggagatgtgattgtttgagggtggtggtggtgttagtgtttggggttgggggagggggtgttttgggtagagatttttgggtttggggtagttgaggtggttgggttttttttatatggggtttgttttttgttgtttgggttgtgagagttttttgttttttatagttttgttttggttttgggatattgtgggtggtttgttttttttagtttgggatattttgttttttgaggtgtggaagagtgttgttttggagtaagttgtttgtgttgtgttttgatagttttttttagttttaagttgttttttattttggattttggttttaattttggttatggagttttttatttaaattttttttttgttgttaaggggttttttttttttttaaggtggtttttgtgagtttttaatgttttgattttttttaatgttatttatggtttttttagttttagtttagttaaaaattttaatgtaaaggaaaagtttggattggttttataggttttttaaaaagtggatttaaaagttgttggtaatgtatttttttttgttagagttgagggtaaatttgttgaaatttgggtgatttgtgtttttttttggagagtaaagtagagaagtgagagtggttattagtttggtaggaaatttgttggaagatgaagaagttaagatagggggttggtgatttttataggaaaagttttggaggagtagttaaagattattagtgttttttttatgtgtgagaattgaaatgattagtattattgattttttttagtattttttgtgaatatttttgtttaggtttttttttttgaaaagaaattgttatttagtttgtttaaaataaattaagaaatttttgggtaatattgtaattatatgaaattgataattgtgaaaataattggaatttttgtttgtaagtgttaatttaaaaaaagtgtttttttttgttatggaagatgtttttttgtgattgattttaattgttgatttgtggagatgtagtgaatgtgaaattttatgtatatgttatttttttttatgtttgttgattgttttggaagattttgaatttttttttggaaaggggtatttattattattttatggggtagtagtttggaaaagtatttggggattaaagaaggttaagtttgtttgttttgtattttattaaaggagtagggaagaaggaattattgaggtatgggggtttatattgtaatgtttttgtggaatatggtgagtgttttttaaaatttttgtttatggttttttttatgtatttattttaggtttttaaggaattttgaataatagtatttgtgatagttttttttaattttatttaataaatttgttattgtagttattttttagtggaattttttttgtataagaaaaagttattttgtgattttggttttatttaaaatttatttgagttgtttattttttgtttgatttttttgttaatttattgttgattttggataagttattttattgttttagggttttagttttttgaggggttggattttagtggttttttagggtttttggttttatgattttgttttaattgaagttgtgggtttttttgataagtatggattttttattgttttgtttatagagagtttttattatatttttaaagtggtttgtgtttttgagaaagttaagaattatagatattggttgatgttaatatttttgatttttttttttgtaagtaggatttgaaaatatttattttggagttatgtgggaaaaattaagtggggaagtagtattttttgtgaattttagatagatagtttttgttttattttttataaggagtaattttttttttgttgatgaagtttttattttgttttttttttgtttagaatgatatttgggttaataaaggttatttgtgatatttttatgaatatatttggtatttgaatgttgtttgtatattttatgttgtttatgtttagtaattttgtgtgaagttaaagttaagggttggtttatattgatgtttataattagttaattagggttattgtttgtattgttgtagtttgatattttttggattgtgttttttatattaaaaaattagttgagtttatttattttataagtaaatgtatgaagtgtgttagtggtttatattttgaaatttatttagaaatattttaatattgggtgattgtagttaataaaggtttttgttggatgaatttgtatttgatagttgaagttttatttttttatgggaaaatatttattttatttaaataaatttgggtgtttggattttattttgttttgaaatattagttttattttagttttgtttttaggtaggtaaatatggtaatgtgttgttatgatggtttttaaatttaggatttaaaaagtgaattatttatattttaattagtgatgattatgtattttatatagtgaaaattggaatagattttttggagagttttggtggaatttattagaatttgaaatgtatgtgttaatgatttagtaattttattttgggaagttagtagagaaagtagtgtagttttttgtgtgtttttgatatttttttaggggttgagaggttaaaattatttttttgttaatagagtattaaggttttgttttttttgttgtgttgatgtttgtagtaatggtataaaagtaaagtaggtgttttagtatgatttagggttgtggtatttaattatatttgtagttattgtattttttatgatgtgtatttatagttaaataaattaaatatatatatatatatatatatatatatatatatatttattttttattgaaaaatgttttttttttttttttttttttttttgagttagagtttttgtgtgttatttaggttggagtgtaggagtgtagtgtggtgattttggtttattgtaatttttgttttttgggtttaagtgatttttttgttttagttttttaagtaggtgggattataggtatgtgttattgatgtttggttaatttttgtattttttagtagagatggggttttgttatgttggttaggttggttttgaatttttgattttaggtgatttatttattttggttttttaaagtgttgggattataggagtgagttattgtgtttggttagtttttattggataatattttgatgaagtagtaaaaattattaattttattatattttgatttttgtgtatgtttttttaatattttgtgggttaaaaaggggggtatgtattaagtatttttgtatagtaaagtataatgattatttttaggaaaagtatttttgtggttgggttgtaaattgaattagttattttttttatggattgttatttttatttgaaattatgataaattatggttatttagattaaaaagtgtatgaaggaattttttaaagaaaataataggtagtatttgttgttaatgatgaaattttagttttttagtgaaaattaggattttggagaatttttttttttttttttttggggtagagttttgtttttgttgtttgggttggagtgttgtggtgtaattttggtttattgtaatttttgttttttgggtttaagtgatttttttgttttagttttttaagtagttgggattataggtgtgtattattatgtttggttaatggagaatttttatttgtttttgtgatatagagattggtggtaatatttatagatgttatattttaatattttataatgaaatgtattatttggaagatttatataaattagtaaattaatatttttttttttgtttgtttttgtgatagagttttgttgtgttgtttaggttggagtgtagtggtatgattttggtttattataatttttattttttaggtttaagtaatttttgtgttttagttttttgagtagttgggattataggtatgtattattataagtgaataatttttgtatttttagtagagatggagttttattatgttagttaggttggttttgaatttttgattttaaatgatttggttattttagttttttaaaatgttgggattataggtgtgagttattgtgtttagttaaattattattttttaaatgattaatgtatgatataaaattatgtataggttaaagatttatttaaagtgtaaaatggaggttaggtgttgtggtttgtgtttgtaattttagtattttgggaggttgaggtaggtggattatttgaggttaggagtttgaatttagttgtgtaatttagtgagattttatttttatagaaatttaaaaaattagttaagtttttattggagttaaagagttgaggttgtggtgagttatgaatatagtattgtattttaatttgggtaatagagggagattgtgttttttgggggtaaaaaaaaaaaaaaatatagtttattggtagagttttttaaaggtagttagtttttaagaaatttttggttaggttgggtatagtggtttatgtttgtaattttagtattttgggaggttgaagtgggtagattatttgaggttgggagtttaggattagtttgattaatatggagaaattttgtttttattaaaagtaaaaaattagttgggtgtggtggtatatgtttttaattttagttatttaggaggttgaggtaggagaattgtttgaattttggagtggaggttgtattgagatgagattatattattgtattttagtttgggtaataagagtgaaatttttgttttaaaaaaaaaaaaagaaatttttggttgggtgtggtggtttatgtttgtaattttagtattttgggaggatgaggtaggtggattatttgaggttagtagtttgaaattggtttggttaatgtgatgaaattttgtttgtattaaaaatataaaaattagatgggtgtggtggtatgtatttgtaattttagttatttaggaggttgaggtaggagaatattttgagttttgggggaagaggttgtagtgatttgagattgtattattgtattttagtttgggtaatagaatgagattttgttttaaaaaaaaaaaaaaaaaaaagaaattattatttattatgttttgatgtagtattaaagaataatatttatggttatttagaaagtttgttttggggggagaaaatagttattttttagtaataaaaatatttgtttttaaatgaataattatgtttttaaattttagtatttatttttaatgtggtaattattgatgagataatttatataaattaagttttttaggggtttttagttattttttaagagtgtgataagggtttgagattaaaaagtttgaggttaggtattgtggtttatgtttgtaattttatattttgggaggttaaaggtgggtggattgtttgagtttaggagtttaagattattttgggtaatataagaagattttgtttttataataagaataaaagaaattagttagatgtgttattatatttgtgtttttagttatttgagtggttgaggtgggagggttatttgagtttgggaggttaatgttgtagtgagttatgattatgttattgtattgtagtttgggtaatagagtaagattttattttaaaataaagtttgagaattgttgttatggaaagtttattaagaaggtatatagggatgttttttgttgaagtattaatattgaatgatgtttgtgttgtggtgagtagaaaaaaagtaatttgaaaattattatttatggtatggttttatttttgtaaaataaaaatatttgtttatttgtgtatgtttaggaaaaaaaagtatggaaggattttatattgaaatttttatttttagggatttggagttttaggtggaattggagaaaattttttttttttggtttgtgtgatgttttaagtgtttttttataataaatttgggttattttataatatgaaaaatttgaagatttaaaaattgaggttaggtatggtggtttatgtttataattttagtattttgggaggttgatatatgtggattatttgaggttaggagtttgagattagtttgattaagaaggtaaaattttgtttttattaaaaatataaaaattagttgggtgtggttgtaggtgtttgtagttttagttatttgggaggttgagataggagagttgtttagatttaggaggttgaggttgtaatgagttgagattgtatgttattgtatttttagtttgggtgatggagtgagattttattttaaaataaataaataaataaaaataaaaattgaattgatgatagtttaatttgttattttttttagatttttttttatgaaagaatttgtttaagttgtgtttgaagataaattaattattttggattttgggtattttttttttaagggaatattatgttattttgtgttatagattgtttgtgattttttatagtttgatttttttagagttggttaatatttatgtaggttagattgaaaaatttgaatttagaaatgtatggtgttggagtagatatggatttggaagttaagaatagtgttggtgttgttgttgatggtgaatttgaaagagtgggtagatggtaattttttgttagaattatttagggttaaagggttagttatatttataagggaaaagaggaaattatgttattaaatattttatgtattatatgttttttttaaattttagtggtttgattaagaaaatttatttttgggagagttggtataataattgaaagtatttagtagttaattttttttttagtgtttttttttttttttaataaatatttattttattgagtatagattatgataggttgtgttgtagttattgatgatatatttgtaaataaaataatttttgtttttttagaatttatattttagtgggaggagatatattataaataagttaagtaaataaaatatagatatgttagtgatatgtgttgaggagaagaataatatagagaaggggatagggaatggggtaggaggtgtaattttagttagggtggttagagaggtttgattgagagggtggtatttgattaaagatttgaaggaggaagatgagtagtaggttttgttgaaatatgtgaaagaattttaggttgagggaattaggatgtagaaatttgaggtagagtttgttagttttaaggagtagtttagaggttattgtattagagtaaagagtaaaaggagagatgtaggaggtaaaatggagggtgggaagagaatggttgaaggagagggtggttttattggtttattttaaggattttgattttgatttatatgatgtgggaaggttttggagaattttttgaggggattatattatttgatgtatgttttagtatgaaatagaatttttttggttgttatgatttgaaggaggataagggagtagggattttatgggggtattgattgtatagagttaggtaagagtgatgatgtttggattaaagtggtggtattgggtggagggttagaattgataagatttgtttttggattagatgtgggatatgggggtgtgagaggggttaagtgtgatttttaggtttttgaattgaataattggaagaatagagttgttttttattgaaatgaaggttgaggttgtagtggtaagttgtgattgtgttattgtattttagtttgggtaatagagtaagattttgttttaaaaaaaaaaaaatatttattattaggtaaaattatttatggtttttaaaattttatttaaaataatagatatttgataaattaatattgtaggttgggtgttgtgatttatgtttgttattttagtattttaggaggttaaggtgggtggatt

SEQ ID NO: 244 - DNA, 35962 bp, Artificial Sequence
  chemically treated genomic DNA (Homo sapiens)
gatttgtttgttttggttttttaaagtgttgggatgataggtgtgagttatagtgtttggtttatagtgttgatttattaagtgtttattattttaaataaagttttgagaattataagtggttttatttgatggtaaatatttttttttttttgagatagggttttgttttgttgtttaggttggagtgtagtggtgtaattatagtttattattgtagttttgatttttattttaataaaaggtaattttatttttttagttatttagtttgaaaatttgagagttatatttggttttttttatatttttatattttatatttaatttgagagtaaattttgttggttttgattttttatttagtgttattattttggtttaagtattattatttttatttggttttgtgtaattaatgtttttgtggaatttttgtttttttgtttttttttagattatagtagttagagagattttattttatattgaaatatatattagatagtatagtttttttggaaaattttttaaggtttttttatattatatgaattaaagttaaaatttttgaaatgggttaataaggttatttttttttttagttattttttttttattttttattttattttttgtatttttttttttgttttttgttttggtgtagtggtttttaggttgttttttgaaattagtaagttttgttttaggtttttgtattttggtttttttggtttgaaatttttttatatattttaatagggtttgttgtttattttttttttttgggtttttaattaaatgttgtttttttagttaggtttttttagttattttaattaaaattatattttttattttattttttgtttttttttttatgttatttttttttttagtatatattattaatatatttgtattttatttatttagtttatttatgatgtgtttttttttattagaatgtaagttttaggagggtagggattgttttgtttataaatatattattagtgattataatatgatttgttatagtttgtgtttaataaaataaatgtttgttgaaggaagaaggaaatattaaggaaaaagttgattattaagtgtttttaattgttgtattaatttttttaaaagtgaatttttttagttaagttattgaaatttgaaaggaatatatggtgtatgaaatatttaataatatggttttttttttttttttgtaaatatgattagttttttgattttgaatgattttggtaaaaagttgttatttgtttatttttttagatttattattaataataatattaatgttatttttggtttttagatttatgtttgttttaatattgtatatttttgaatttaagttttttaatttaatttatatggatattaattaattttagaaagattaggttatgaaagattgtaaataatttgtaatataaaataatatggtatttttttagaaaaagaatatttagggtttaaagtaattggtttgtttttagatataatttaagtaaatttttttataaaaagggatttgaaaaaagtgataggttgggttgttattaatttagtttttatttttatttatttatttattttgagatggagttttattttgttatttaggttgggagtgtagtggtgtgtaattttagtttgttgtaattttgattttttgggtttaagtaatttttttgttttagttttttgagtagttgggattataggtatttgtaattatgtttagttaatttttgtatttttagtagagatagggttttatttttttggttaagttggttttaaatttttgattttaggtgatttatatgtgttaattttttaaagtgttgggattataggtatgagttattgtgtttggttttagtttttaaatttttgaattttttgtattataagataatttaagtttgttgtaaaaagatatttggaatattatataaattaaaaagagaaagttttttttgattttatttaaagttttaagtttttagagataaaaattttggtgtaaaatttttttatattttttttttttggatatatataaataaatagatatttttgttttataaaaatggggttatattataaataatgatttttaaattgttttttttttatttattataatatagatattatttagtgttagtattttagtaagaaatatttttatgtgtttttttgatagattttttatagtaatagtttttaaattttgttttgagatggggttttgttttgttatttaggttgtagtgtagtggtgtgattatggtttattgtagtattggttttttgagtttaagtgatttttttattttagttatttaagtagttgggaatataggtgtgataatatgtttggttaattttttttgtttttgttgtagagatagggtttttttatgttgtttaggatgattttgaatttttgggtttaagtaatttatttgtttttggttttttaaagtgtgaaattataggtataagttatagtgtttggttttaaattttttaattttaggtttttgttatatttttgaaaaataattgaaggtttttaagaggtttagtttgtgtaggttattttattaatagttattatattagaaatgaatattgaaatttaaaaatataattatttatttaaaaataaatatttttattattggaaaataattgttttttttttttaaaatagattttttagataattgtagatattgttttttgatgttatattaaaatatggtaaatggtagttttttttttttttttttttttttgagatagagttttattttgttatttaggttgaagtgtagtggtgtgattttaggttattgtaatttttttttttggggtttaagatatttttttgttttagttttttgagtagttgagattataggtgtatgttattatgtttatttaatttttgtatttttagtatagatggggttttattatgttggttaggttagttttgaattattgattttaagtgatttgtttgttttatttttttaaagtgttgggattataggtgtgagttattatatttagttaggaatttttttttttttttttgagataagagttttgtttttgttgtttaggttggagtgtaatggtgtgattttgttttaatgtaatttttgttttggggtttaagtaatttttttgttttagttttttgagtagttgggattagaggtatgtgttattatgtttggttaattttttatttttggtagagatagggtttttttatgttagttaggttggttttgaatttttgattttaggtgatttgtttattttggttttttaaagtgttgggattataggtgtgagttattgtgtttggtttagttaggaattttttaaaggttggttgtttttaagaaattttattaatgaattgtatttttttttttttttatttttgagagatatggtttttttttattgtttaaattggaatgtagtgttgtgtttatggtttattgtagttttgattttttggttttagtgggagtttggttaattttttaaatttttgtagaggtaagattttattagattgtatagttgggtttgaatttttgattttaggtgatttatttgttttggttttttaaagtgttgggattataagtatgagttatagtatttggtttttattttgtattttgaatggatttttaatttgtgtatgattttatattatgtattgattatttagaaaataatggtttggttgggtatggtggtttatatttgtaattttagtattttgggaggttgaggtggttagattatttgaagttaggagtttaagattagtttggttaatatggtgaaattttatttttattaaaaatataaaaattatttatttgtggtggtgtatgtttgtaattttagttatttaggaggttgaggtatgagaattgtttaaatttgggaggtggaggttgtagtgagttgagattatgttattatattttagtttagataatatagtaagattttgttgtaaaaataaataaaaaagaaaatattgatttattgatttatgtagattttttaaataatatattttattataagatattaaaatatggtatttgtaaatattattattaatttttatattatagaggtagataaaaattttttattagttaggtatggtggtgtatatttgtaattttagttatttgggaggttgaggtaggagaattgtttgaatttgggaggtagaggttgtagtgagttgagattgtattatagtattttagtttgggtgataagagtgaaattttattttgaagaggaaaaaaaaaaaattttttaaaattttaatttttattggaaagttaaaattttattattggtaataaatgttatttgttgttttttttgaaagatttttttatatattttttagtttgaataattatagtttgttatagttttaagtaaaaatggtagtttatgaaaaaagtggttagtttagtttgtaatttaattatgaaagtgttttttttggagataattattatattttattgtatagaagtgtttgatgtatatttttttttttaatttatagaatattaagaagatatatataagggttaaaatgtaataaaattaataatttttgttgttttattaaggtattgtttagtgaaaattagttaggtgtagtggtttatttttgtaattttagtattttgggaggttaaggtgggtggattatttgaggttaagagtttaggattagtttggttaatatggtgaaattttgtttttattaaaaaatataaaaattagttgggtgttagtgatgtgtgtttgtagttttatttatttgggaggttgaggtaggagaattgtttgaatttaggaggtagaagttatagtgagttgagattgttatattgtatttttgtattttagtttgggtgatatatagagattttgatttaaaaaaaaaaaaaaaaaaaaaaaggatattttttagtgaaaagtggatatatatgtgtgtgtgtgtgtgtgtatatatatatttagtttgtttaattgtgagtgtatgttatgaagaatgtaatgattataagtatagttaggtgttataattttgaattatgttaagatatttgttttatttttgtattattattgtaaatgttaatatagtaaaagagataagattttggtattttattaataagaaaatagttttagttttttaatttttgaagagatattagggatatatagggaattatattgttttttttattagttttttagaatgggattattgggttattggtatgtatattttaaattttgataagttttgttaaagttttttaaaaagtttgttttaatttttattatgtaaggtgtatgattattattagttaaaatgtaaataatttattttttaaattttgaatttgggaattattataataatatattattatatttgtttgtttaaaaataaagttaaaatagaattaatgttttaaggtaaagtaaaatttaagtatttggatttatttagatgaagtgaatatttttttgtaagaaagtaaaattttagttgttaaatgtaagtttatttaatagaagtttttgttgattgtagttatttaatgttggggtatttttgaatgaattttaaagtataagttattggtatattttatatgtttgtttataggataggtgggtttaattgattttttaatataaaggatataatttaaaaaatgttaggttgtaatagtataaatagtaattttaattaattggttatagatattagtgtaagttgatttttagttttaattttgtatagaattattggatatgaataatataaaatgtatgggtagtatttaaatgttaaatatgtttataaaaatgttatagataatttttattggtttaaatattattttaaatagggagaagataggatgaaagttttattaatgaggaagagattattttttatggaaggtaagatagaagttgtttatttaaaatttataaggaatgttgtttttttatttgattttttttatatggttttaaagtgagtatttttaagttttatttatgaaggaaaaggttaaggatattagtgttaattagtatttatgatttttaatttttttaggaatataaattattttgagaatatgataaaagttttttgtagataaagtagtaaagaatttatgtttgttagaagagtttatgattttggttagagtagaattatagaattagggattttaagaaattattgaagtttagttttttaggaaattaaagttttggaatagtaaagtggtttgtttaaggttaatagtgaattagtagaggaattaggtaagaaataagtaatttaaatagattttgaataaagttgaagttatgaagtaatttttttttatataaagaaagttttattaagagataattatagtaataaatttattaagtggaattggaaggaattgttgtaagtattgttgtttaaagttttttgaaggtttaagatgaatgtatgaggaaaattatgagtagaaattttgaaaagtatttattatgttttataaaaatattgtagtgtggatttttatgttttgatgatttttttttttttgtttttttgataaaatgtagggtaggtaagtttggttttttttggtttttaagtatttttttaggttgttgttttataaagtaataataggtatttttttttagaagagggtttaagattttttagaatggttagtgagtgtagagggaaatggtatatatgtgggattttatatttgttgtatttttataagttagtaattgaagttaattatagaaagatattttttataataaaaggaagtattttttttaggttgatatttgtaagtaggagttttaattatttttgtggttattaattttatgtaattgtaatgttatttaaaagttttttgatttgttttaaatgggttgaataataatttttttttaagaagaaaaatttaaatagaaatatttataggggatgttgaaaagggttaataatgttagttattttaatttttatatataaaggaaatgttgatggtttttggttatttttttagaattttttttgtggaagttattaattttttattttagtttttttattttttaataaattttttgttgaattagtggttgtttttgtttttttgttttgttttttggaaaaggatatgggttatttagattttagtgagtttgtttttgattttgatgaaaaggaatgtattgttagtaatttttaagtttgttttttaaaaggtttgtggaattaatttagattttttttttgtattaaagtttttggttgagttgagattaagggggttgtaggtgatattggaagaagttagggtattagaggtttgtgggagttattttgggggaaggggagattttttgatagtaagggagggatttgaatgggaggttttgtggttaaagttggggttgggatttggaataaggggtggtttggggttgagggaagttgttggggtgtggtatgggtagtttattttggggtgatgtttttttatgttttagaaaatggggtgttttaagttgggggaaatagattatttgtagtgttttaaagttggggtggggttgtaagggatgaaggatttttgtggtttagatagtggaaggtgggttttgtgtagaggaggtttggttgttttagttgttttaagtttgggggtttttgtttgagatatttttttttttggttttggatgttgatattattattgtttttaggtagttatattttttgagttttgttgagggatttagttgttttttgttggtaggggttgtggatagtggaggggttttttagttgtaggatttgggaattggttttggttttagtgttgtttaggtatagatattaaattttgtggttgttatgatggattatgagttgttttataatgaggttaggttttgtttttggttttgtttatggtgatgtttggagtttgttttgaggggatttggatgttttaagagttgtttttttgggatattgttgttttttttggttttggttttattgtttgtgaaagtttggtttggtatgattttttaaatgtggtttttttgagtgtaaggtgagtggtaaggaagtatttgttttttttgtattgttattggtttttgagaatttgggttaggttttttttttttgttttattggttggtgggagtagtagggttggattttttagttaattgtgtttggtgtagtttgtggtgtgtgttgggagttgtggttttatggtatgtgtttgagtttgtttgtattaagatttttggtttgggttttgatttttggggtttggttttgtttttttgggatttggtagatttttgttggtttagtgtaggttggattgtgtttttttggtgtgagtagtgagatttggaagagttaaagtgagggaaaaattgtggattggatttttttggaagtggagttggataattttttttagtttttaagggagaaaatttggtttgtttttagaaattaaggtttttgatgttttttaagttttttattttttaaaaagtataaatattagaattagtgggttgggtgtggtggtttatgttggtaattttagtattttgggaggttgagatgggtggattatttgaggttgggagtttgagattagtttgattaatatggagaaattttgtttttattaaaaatataaaattagttaagtgtggtggtatatgtttgtaattttagttatttaggatgttgaggtaggagatttgtttgaatttgggaggtagaggttgtggtgaggtgagatggtattattgtattttagtttgggtaataagagtgaaattttgttttaaaaagaaaaaaaaaaaaaaattagtgaagaaatatatagatatagggaaaatatttgatatgttgttaatgaatttaattgtttttttgggtattaggaggtttatttattatagaaaaggtatttgttgggtttgttaggtgttattagatgtttgttttagaatgaatttttaatattataaatattttataggtggatatgtgtttatatgaaaatattttttatattagttgagaaaatgtttagatggttgggtttagtaagttggtagaattaatgatttagatgtgttaaagttatatttaataaataatttatgttttgtgattaaaaagtattttggtttttattataggttttttatgtttttttagagtgttgtatttgataggtattttatttttttttttttttttttttttttttttttttttttttttttttttttttttttttttttttttttttttttttttttttttttttttttttttttttttttttttttttttttttttttttttttttttttttagatggagttttgtttttgttgtttaggttgtgatgtagtaataggattttagtttattgtaatttttattttttggatttaagtgatttttttgttttagttttttgagtagttgggattataggtatatattattatatgtgtttaatttttgtatttttagtagagatagggttttattatgttggttaggttggttttgaatttttgattttaagtgatttatttattttggttttttaaagtggtgggattataggtgtgagttattgtttttggtttgagattttatttttaaggagggatttatttattatagtttttattttatattgagtattgtttatattttttataaattgtattattttatgtaatttttattatagtttagtgaggtatgtaatattattttttataatatagatggggaaatagagatgtgatttatttatttaaggttatttggttaatgtgtgatagagttataattttattttagattgattttgttttaaaatttatggtttttattgtattatttagtattaaaaatttgttgatttgagattattgattttttataagttgttattgatattggaggaatagttgtatgatgagtgttgtatatttagttattatattaagtattttagaaatatttttgttgtattgaaagatgatatttatttttgatattggttttaagaggaattagttatttggaaggtatggaatggaaaatatgaaaaattgtgtgtagatttagaattggaatttataaatttagatgtgatttggtttagttttgtttttttataaaattatttggttgataattttagttttgatttgtagtgttattttttaattgtgaatgtttttgttttgttttatttatttattatttattatttatttatttattttgaggtagttttgttttgttgtttaggttggagtgtagtgatatgatttttgtttattgtaatttttattatttaggttgaagtgatttttttgttttttaagtagttgggattataggtatatgttatatatttggttaatttttgtatttttgtagagatggggttttattatgttggttaggttggttttaaatttttgattttaggtgatttgtttttttggttttttaaagtgttggtattataggtatgagttattgtatttggtttatttatttattattttattttgattatattttaattattttttttggagattgtgttttttttttatttttatttatattttagttattttttttagatttttttttttttttttgagatggagttttgtttagttgtttaggttggagtgtagtggtgtaattttagtttattgtaagttttgttttttgggtttatgttatttttttgttttagtttttggagtagttgggattataggagtttgttattatatttggttaattttttttgtatgtttagtagagatagggttttattgtgttagttaggatggttttgattttttgattttgtgatttatttattttagttttttaaagtgttggtattataggtgtgagttattgtgtatatgttttattttttagtttagtttaaaattgagtagttaaattagaatttttaatatatatttttttaaattaataatttatggttgggtgtggtggtttatatttgtaattttaggattttgggaggttgaggtaggtggattatttgaggttatgagttttgagattagtttggttaatatggtgaaattttttattattaaaaatatagaaattagttgggtgtggtggtatatgtttgtaattttagttatttgggaggttgaggtaggagaattgtttgagtttgggaggtagaggatgtagtgagttgagattgtgttattgttttttagtttgggagatagagattatgttttaaaaaataaataataatttatttaagaagtatttattgaatatttgtatgtgaagtattgttttaggtgttgagatatagtggtgggggaagaaatttatttttgtttttatggaatttatatggaaggatgggtaataagtaaaataataatttaaataaaagattagttttaatgttggaattaaatttttgggtttataaatttttagttagtttagtttattttttaaaggattgtattatgatatttttttagagtttaaatttatattgatttataatttaaaggggttttattaagtttttttaattttgagtttatttttttatttgtaaatggaggttatagtttattttataagggttttgggttttttgtttaatttgatttgtttgtttgaagatagggttttattttgttggttaggttggagtgtattggtataattttagtttattgtagttttgattttttgggttttggtgattttttggttttagttttttaagtagttgggattatagggatatgttattatatttatgtttttttgttgttgttgttttgtagagatagggtttatgaggattaaattagattttatttggttttttataaagattgggattatgttttttgggagttatagtagaggttagttgtatttgatttaaagttttatttttagttttttattttgttatttttttgttttaggtgagttttatgtttaatgtttagattttagtatttttttttagagatgtattgtattttttttttttttttttttttggagatagagttttattttgttattttggttggagtgtagtggtatgattttggattattgtaatttttattttttgggtttaagtgatttatttgttttagttttttgagggattataggtatttattattatgtttagtttattttgtatttttagtagagatggggtttttttatgttagttaggttgattttaaatttttgattttaggtgatttgtttgttttagttttttatagtgttgggattataggtgtgagttattgtatttggttaatgtattgtattttaaaaatgtttgtataatattgtagaatgatattttttttaaaaattgaggtatagttttaagaggttttgagaatataggttttgaatgatattgttaagggtttaaaaattagaatttaaagtttggtaaatgtttgataattggaaataaatattgtttggttgggtgtggtggtttatatttgtaattttaatattttaggaggttaaggtaggtagattatttgagtttaagagtttaagagtaggttgattaatatggtgaaattttatttttattaaaaatataaaaatttagttgggtgtagtggtttatttttgtaattttagtattttgggaggttgaggtgggtagattatgaggttagaagatagagattattttggttaatatagtgaaattttgtttttattaaatatatataaaattagttgggtatggtggtatgtgtttgtagttttagttatttaagaggttgaggtaggagaattgtttgaatttgggaggtggaggttgtagtgagttaagattatgttattgtattttagtttgggtgatagtgagattttgttttaggaaaataaataaataaataaataaaaaaattagttgggtgtggtggtgggtgtttgtagttttagttatgtaggaagttgaggtaagagtattatgtgaatttgggaggtggaggttgtagtgagttgatattttgttattgtattttagtttgggggatagggtgagattttgttttaaaaaaaaaaaaaaaaaaaagtaatattgagtaatattgttatatattgaataaatttttttaagtttatatatttttattaaaagtgatttagttaaagtaattttttaagttgttaaagggatttagtattatgtaaagattttagtttattttattaaaaaaaaaaaatataaaatatttattggaattatatttaataatggtgttttttagtgggttattgtaaggaaataattattaataattgtttttagataagtaattttgtgttagttttatttaataggtaattattatttagtagatattggatgaatagtatgggttggtaggttgggagatattaagtgaggagggtaaataagttgatatatggttttggggaaaattaaatttagttatttaggaggttgaggtaggaagattggttgagtttaagtttatagtgagttatggttatgttagtgtattgtagtttggattatagagattttgttttttaaaaaaataaaattaaatttgatttagatttttattttttgttatttttttttttttagagatatatagtttggataattttaaaaatatgataggttgatttatttaaagttgtaatatagtttatagaatatttaattgtttgtaaattttttaaaattagtaatataatttgggataggaaaaataaaaaaagaggttaggagttgtggtttatatatataattttagtattttgggaggtaaaggtgggtggattgtttgagtttgggtaataataaaaaaatttgtaaaaataaaaaaaataggtagtgtgtggtggtttatgtttgtaattttaatattttgggaggttaaggtgggaagatggtttgagtaggagggttgtttgaggttaggagtttaagattagtttgggtaatatagtgagattttatttttgttgaaaaataaaaaataaaaataattagttggatgtggtggtttagtatttgtagttttagttatttagaaggttgaagttggaaattggttgagattaggaggttgagatgtgattgtgttattgtagtttagtttaggtgatagagtaagattttgttttaaaaaaaaaaaaaaaaaaaaaagttaggtatggtggtatgttatatgtttgtggatttagttatttgggaggttaagataggtttatttgagtttgggaggtagaggttttagtgatttgtgatttatgttattttattttagtttgggtgatagagtgagattttgttttaaaaaaagaaagtgaggtaagaagttgtttattgtgttgttatagagaagtatattatttaatgaaaaagagttaagttgtatttgaaagttattaaatgtagtgtttaaagttattattattgagattgttttaggtttatgtggagtagttagggttttgttggaaggtattttgttagttaagtttttttttagttgtttttagttttttattattatttggaataaaagaatagaaaataatgatgttaagatatttatagttgggtttagtggtttatgtttgtaattttagtattttggtaggttgaggtggggggattataaggttaggaaattaaaattattttggttaatatggtagaatgttatttttattaaaaatataaaaattagttgggtgtggtggtatgtgtttgtaattttagttatttgggaggtttaggtaggagaattgtttaaatttaggaggtggaggttgtagtgagttgagattgtgttattgtattttaatttggtgatagagtaagattttgttttaaaaaaataaaaaaaaaaaagatgtttataaatattaaaaaatatggttgggtgtagtggtttatatttgtaatttaaatattttgggaggttgaggtgggtggattataaggttaagagattgagattagtttggttaatatggtgaaatgatttttattaaaaatataaaaattagttgggtgtgttggtgtatgtttatagttttagttatttgggaggttgaggtagaattgtttgaatttaggaggtggaggttgtagtgagttgagattgagttattgtattttagtttagtgatatagtgatattttgttttaaaaataaataaataagtttgttatatatgtgaagatagtgtttgtatatagtgtttttttttttttttttttttgagatagttttattttgttatttaggttggaatgtagtggtatgattttagtttattgtaagttttattttttgggtttatgttatttttttgttttagttttttaagtagtagagattataggtgttagttattatgttaggttatggtttgttttttttgtatttttagtggagatggggttttattatgttagttaggatggttttgatttgattttgtgatttatttattttagttttttaaagtgttgggattataggtatgagttattatgtttggttgtttttttttttttttttttttttttgagatagttttattgtgttatttaggttgaagtgtaatggtgtgattttagtttattgtaattttgttttttgaatttaagtgatttttatgttttagttttttgagtagttgattatatataggtttgtgttattatatttggttaatttttgtatttttggtaaagatgaggttttattgtattggttgggttggttttgaatttttgattttaggtgatttgtttatttagttttttaaagtgttggattataggtatatagtatttttgtttttaagaatgtttttttaaatttatattagggtattatttttagatagttattagaaaaaataatgtataggaatttttatattttttagtgagaattttggtgtttttttattttttaattttgaattatttataagttaatgttttatattattttaattataggatgaaaatagttttgtttttttagtttttatttttttttgtttattttttttatgtttatttgagtatatggatttagaatatttattgtattattatgaataatttagtattttataagttattttttaagtaggatagattaaggtagtttggtgtggatataattatatttatggttataaggaatatgtaatagaaaattagattttaattaagtaaaaggttgtttgtttttttttttttttgaaatatagttttgttttgttatttaggttggagtgtggtatgtgattttagtttattgtaatttttgttttttaggtttaagtgatttttttattttagttttttaaatagttgggattataggtgtatattattatatttggttaattttttgtatttttagtagagatggggttttattttgttggttaggttggttttgaattattgattttaggtgatttgtttgttttggtttttttaagtgttgggattataggtgtgagttattgtgtttggtttgtttggttaattttatttttttaattttattagttgtatttttagttatttaaaggatataggaatggaggttaaaatagattatttggaggttagggatgttatgttttttattggggtaattttatggggtattgtgttttgtgaatgatagtgagtggaagataaaggattttttatattattttaggatgggagtttatttgattgtaatattgtgtattttgaaagagttgaaattattttttaatattgggatttagttggtaatttaaggaagtattgtttatttgttatttaggtttggtgttaggataggagaaagtaggtttgtgggttggaggttgttatagggttgttaatgtagataaagggatgattttttgagtttttgttgagttatatatggggattatatattatagtttttatttttgtaaggtttatagttttgtgtttttggagtatttttttattttttttgttttaaaagtttttggtgtgtttttattataattttttttattatttttggttttaagatgtttttgatttgaaaaagggaaaaggtatttgtttagaaaagaaattaattataaatagattattaagttaatttaaatataaattaagttgttaatataaattttttgtattttttttatgttttagagattaagtgttataagatatgatttgttagaagtagtttaataaattagtaagatgttttgggatatagttgataagaataaagatattattttgatatttatttaaaagttggttgaaatttgggagaggtaagatgtagtttagaggttgtttttataaattagttttatttgatattttttgttttaaaatttttagattgatattaggtattgagaatattgtaagttttttagggaaagatttattagatatttattaaggttgttttaggttagtttatattgatggatgttgggaaagtattggggagatgtgtatattgtttttgaataaataatagagtagtttatagattagtgaagaagggagaggttttggggagagtatttgatgtggaagggatgttttatagtagtataggatgttggtattatatagtattattttttgagttattagtgagatgatgtagttttgaagttgggatattattttttgattagtaagagagataggttataaggagatatagagaggggaagggaaatataaataggattaaaatatgtgattagttatagaaatttataaataaattatttatgatttagatagtattattttggaattttaaattaattaaatagttaattttaagggagattaaaaggaatggggtagggtgtagtgttttatgtttgtaattttagtattttgggaggttgaggtgggtggattataaggttaggaatttaagattagtttgattaatatggtgaaattttatttttattaaaaatagataaattagtagagtatggtggggtatatttgtaattttagttatttaggaggttgaggtaggagaattatttgaatttaggaggtggagtttgtagtgagttgagatggtattattgtattttagtttgggtgatagagtaagattttgttttaaaataaaataaaataaaataaataaataaataaaaaaatagaaaaagaatggtttttttattggttttttggttattattttgtaattttgttatttttattaataaatattaaattatttattgaatttatttttttagaagagaagataatatgggttttatgaatatattgtgatggaaagttaaagtgatttagtttatattagtaatatagttaaaaataattaattttattggttataaaaatatagtaaagattgagttttttttattttattgaaaatggttatagtgtttgtttatttttaggtttgtaatgaagttttttgtttttttttttttgtgtttaggtgttgggtaaatttagatgaagttgttgttattgagaattattgaggtattatatggtaaattatgaaagtgggttttttgttgttttattagggagggggaaatttggattaaaattttttgatttagttaaagaaatatattatgaagttaggttattgtaagattggtgggatgaatgaaaaggagattatagaatatatattttaagtatatttaaattggtgttttttttgtttataattgttgttgtttatatgtatatatatagtatatatttttgtagagaatgttttgggatttagaggttatttatatattttagtagaaggtgatttttaatatttttttttgttatttttttttgtagttttttttgtattttaagttagaatttatgtgttagatattagagaagttgaagttaatgaggaagtgagttggagttttttgttggtttaggagtattgtgttgttttatgattttagtttatatttgaattttaaatatttattttgtttgtgagatgtgtgtttttgggtaggtaaggagatgggtggagttgggtgtaaatttatgtttggttttggtaggatagtttaagtttatgttttgttaaggaagagtttgtaggatttagggttgtgaaagttagtatattgtagtagttttttgtttattttatgtatattaatgtggttgtttgtagttattttattaagggaagaggtttttgttttatttagaaaataaaaatgtttatttagataaagttaagagattagtaaattttaatttgttttaggaagtatgttttttttaaaatagtaaatagttttaataatgtaattttgtataagaaaagtagtgaaattttatttagaggtttagatgatagagtaagttttgttagtaataatatttattggattgattggatgtttgtttaagggttgtttaattagatttagtttgtttttgtttttaggatagttttagttttagtgttgagttgtagtgttttttggaggaagagagatagttgtattttttagtttatagttggaggggtttttttggtgaaagttagtttttttggagaaaaaggataaaatttgttttttataaggttattgatttatgattttgtgaattttgattgttttgatgttatgtttaaggaatatgattagtttgtgggatgttagtttttattaatgtttagttattggggttttttaggttagaattttagagagttatggggatttaaaaatagttttgtagttttagttagtaaataggaatattaagagtttgatttatttttttatattttaggttttttgtgtgtaaagagatagttttgttagagaatattgtttggattttagtttggttagggtgatgaaggaataaatagtagttttggttatatattgttttgttttttgtagtttttttttttgattttatatttttattttttttttttttttttaatggtttaggtttaataatttttgatttagagtatattattgtgattttatttttttttttggttgttatgaatattttttttttaaaaatatagatagaaggttaggtgtggtggtttatatttgtaattttagtattttgggaggttgaggtaggttgattatttgaggttaggagttttagattagtttgattaatatggagaaattttgtttttattaaaagtataaaattagttgggtatagtggtgtatgtttgtaattttagttatttaggaggttgaggtaggagaattgtttgaatttgggaggtagaggttgtagtgagttgagattttattattgtattttagtttgggtaataagagtgaaattttgttttaaaaaaataaataaataaataaataaataaataaataaataaataaaataaagatagaggttaggtatggtggtttatgtttgtaattttagtattttgggaggttgaggtgggtagattatttgaggttaggagtttgagattagtttggttaatatggtgaaatttgtttttattaaaaatataaaaattagttaggtatgatgtatgttggtaattttagttatttgggaggttaaggtagaattgtttgaatttaagaggtggatgttgtagtgagttgagattgtgttattgtattttagtttgggtaatagagtaagattttgttattaaaaaaaaagaaaaatttaaaaaataatataaaatagagatagagttttgttttgttatttaagttggaatgtagtggtgtgattatagtttattgtagttttgagtttttgggtttaagtaattttttggttttagttttttgagtagttaggattataggtatgtgttattatgtttggttaatttttttttaatttttttgtagagaggggggttttgttatgttgtttaggttggttttgaatttttaggtttaagtagttttttttttttggttttttaaagtgttgggattataggtatgagttattatatttggtttgttattaatattttgatgtgaataatattttttttattttttgtgttaaaagttaatattattaataaaagtttagtttaaagtataggttattgtaagttataagatttaaagaaatgatttagtagtaggttttaataagagttggggagttagtttgaattaaggagattgagaaaggatgtagtagagtttgatatttggtttaagatttggatttttgtaaggatgatatggtttttttgttagagatatataatggaaggtttattttttagttttatagaaaagtattaagaggttggagtgtaaagtgtaggatatattgataaggttttttttttgtaagaaattttttattgtaagtttattttttgtagatttttttttttgaaatatataaagaaatgatattatttaagttagatttttagaaaggtttttattattttttttttatttttttttgagatgtttgaggttaattataatatttaagtattgagaattatagtaagagtaggtaatttaagttatttgaggggaattagtgataattatgattttttattttaaaagatttttttatagttttttttttttttttttttttttttttgaggaatatttagattttttttaattttatttagttaatatttttatagttattttttatgatagttttttgtggtttagtaggattagattaatttttgtttggatatatttttgtttatatatttttttttattttagattttttgaattagttatttaaagtttttttatttttttaggattaattttaatgtttgttttttttataagttttttttattgaaatttttttttgtataattatagtttatttatttttttattgttagggattaggttagttattttatattttttgttggggaatttaattgtgtttggtatttggtatagagtttggtatagtaagtttttttgtaaatatatgttggattgaagattaaggtgaattatggtattttataaaaggttgtggtttagttattgtggttgtttggaatgttagtaattatattttatatatggttgaatgaaatgttttttaatttataaaaatttaatgtaaagataattttttaaggaatatttttattatgtaaggttgttatatttaaaaggaaaattgttaataattagtatttaagggtttttttttttaattttttgttgggattttattttatggatgtttttgattttattatatgttaattgtttttttttttgggagatttggatagggtgaaaagtttatatatatatttaggtagtaaattttatagtagataaataggagttaaaggggtaattttagtgtaaattaaagttttttggtggaataaagggttttatggttttttttagtttattgggttttagtttatggttttagttgtagtttttattagtttttttttaggaaggtttatggatgagagtagtaagattgaatttagtttggagttggtttttattttttattttttttgttgaatttataagttaagttttatatttggatatatgttttatgtttatgtgttatattataaataattagtaaggttagatgtggtggtttatgtttgtaattttagtattttgggaggttgaagttggtggattatttgaggttaggagtttgagattagtttgattaatataatgaaattttatttttattaaaaatataaaaattagttgggtgtggtggtgggtgtttgtaattttagttatttgggaggttgaggtaggagaattgtttgaatttgggaggtggaggttgtagtgagttaagattatgttattgtattttagtttgggtgatagagtgagattttattttaaaaaaaaaaaaatatgaattagtaatttgaaattgaataagttatatatttatattagaagttatataatggttaaatgtaatgaatgttttttttatgtaattataagtggaatgattgttttatgaatgaaattgttagtttgttttgattttgtaaatattaatttgatattgatgttatttttgtgatttgttttattatgatgttttttattttattaatgtatttgaaagataaaatataaggggtttatttatttgtgagtagattttttgataagattatatattatttgagatgttggtttaatagggtgaaagtttggaataggtgttatatttagtaaatttatgtaattatattgtttggatttatttttagaaattgttaattttaaatatttttttatgtataaagtttttattaattatttttagatatattattattttaagtagtttatttagtttaaaaattttattttgtttgattatatgataatgaaaaatatggattatttttttgtggtatatggatgagttttgtattagttaaaggaagagaaaggaaatttgagttaggattttaattatataagtttgtttatgttttttttatttatttattgtttgttttttttaagtttttttgttagttttttatttgtgattttaatgagatgtatttagtgttgaggttaagtttttagatttttttattttttggttatttaatttaatatttttaaaatattattttgtgttgtgattgtgttatttttttgaattttaaattttatttaattgttagttatttaattttgttatttagatgattaataggtatttttaaatgtattaagtataaaattaagtttttttgtagttttttttagttttttatagtaaattgagataggggatgagttgtttttattttagttaatggtgattttatttttttagttgtttaggttaaaaattttggagagttttttgattttttttttttttttatgttttaggataagtttagtagtaaaatttgttggttttatttttaaaatatatgtaggaaataaaaggtatttaaattggaaaggaagaagtaaatttatttttatttatagttgatggggttttatgtatagtaaagtttaaagaatataaaatttaatagttttttatgattttaaaaaaatatttggaaaataaaatttgtgtagattttaattatttttttattttttattgtttttattttagttgaagttattattattttagattatgagtatggtttttaatttatttttttaagtttgttttatttttttttaattttttattagtagttagagtgagtttaagtttagattaagttttttttttgttttattttttttagtgttttttagattatataaagtagaagttaaaatgtttattttggttataaggtaggtttatgtttgtttattttagttttttgtttatatttgtttttttttttttttttatttattttgttttaattttattggtttgttttttggggttaatttttattgaatgtttttaggtattaggttttgtgttaaatattttataggtattattttattgaattttaaagaaaattttaggttaggtatagtggtttatgtttgtaattttagtattttgggaggttaagtggggggaaattattagaggttagtagtttgagattagtttggttaatatggtgaaattttgtttttattaaaaattgaaaaaaattagttaggtgtggtggagggtgtttgtaattttagttatttgggaggttgaagaaggagaattgtttgaatttgggaggtgaaggttgtagtgagttgagattatgttattgtattttagttttggtaatagagtaagattttattttggaaaaaaaaaaaaaaaaaaaaagagaaaattttatgaagtaggttatgttattatatttattttgtagaggaggtaattaaggtttggagtggtgatataatatggggaaatttttgaagtttgtattgatttgtattattttatttatagttatggttaaaattttagatttatagtatgatagggtaggtaggggtggggtgggggataaggagggggtaggaaaagtttggttgtataatttgatgttgtaagaaagggaatatatattttttgtttttatttggtttttaaagtttttatatagattaatttgtttattttttttatagagttagtaatagatgtaatgagtttttttttttttatatatgttttatggtttttgatgtaaggtgaagatataaagaaaggatatgagggtaatttgaaatgatttttttttttttaagaataatgtgttttttaaagttaataggttttttttgtaaagtgtggtttttgtgttggttgttttttttgtttttagtgttttttttttagatagttatttggatattattttttttatttaggtttgtttaggtgttattttttgtagtaggtttattttgattgtgttattgaaaatatagtttattttgttgttattattttttttatatattattgattttgttttatttttttttttattgtattattgtttaatattttgaataatttatttattgtgtttattatttatttttttttgttagaattttattaggatagagattttttattttgttataataatttaattgtataaaatatatgttgaaagtattaatgaaagaatgaattttaagattttttaggggttaggtatggtggtttatgtttgtaattttagtattttgggaggttgaggtgggtagattatatttgaggttaggggattgagattagtttggttaatatagtgaaattttgtttttattaaaaaaaaaaaaaattaaaaattagttgggtatggtggtgtgtatttgtaattttagttatttaggaggttgaggtaggagaattatttgaatttaggaggtagaggttgtagtgagttgagattgtatgattgatttaagatagattttgttttaaaaaagaaaaaaaaattttttggtatttattaattttaaattaataggttaaagggtaatgttatgaatgttgtgttttttgtatatatataagtaaaaaaataataataataaaggttgaaatattagtgttatttatgatgatataatggttggttttatttttttttttatataattgttttatttaatttttattattgtattatattgttattattattattttatagatgaggaaattgattgtggagaggtaatgttgttaataagatgtgatggtagtaggattggaattttaattgtttgatttaagagtttttttttttaattataatatattgtattatattttttagatttaaaatgtgtataaatgggtgtatgtagtataatgtaattgtttgttttaagattgaataattatggattttaaattgaagaggaggtagttaagaatgtttattgtttttttagagagttgaaaattggaaaagagtttgtatttaattttttttagttttttaggttttttataaggaaggattaaagatttggattttaggtagaagatttaaaagttatagttattggaggttaggagtggagggttttagggagttgagataaatgtagatggggatatataagatgtagggagtaagaagtatgaggtttggaagtgaggtgtgtaggatgtttagatgaagtgttttgggttttgtggggagttatatatatagggatatgaggtttggattatgtgtagagagttttgaagttgttttttgaagttttgatttttttaagtttttatgtattgtatgaattttgtgtttgtagtgattgtattttttggtattattagatgttttttagtgttgtggtttagttttttgttaagaggtttgtgagttattggaagttttatttttattgttattttggtgttaatgagttgtgtaggtgtagtttagttgggagttgtgatatttgattttataattttaggttgtgtttggaggggtggggaagggtggggatttagagtagttgttaatgagaatttatggtttagaggttatgtttataattggtaataataaggtgaatttgaagggaagggagttgagttgttatgtttattattggtaaggaagtatttgtggaataataaaattttatgttgtgtggtgtgtgattttttattaaaattgttttgtatttattattttatttattgtttattagggttagagataattgagaaatggatttttgagtttttgtttaattttaagttgttgaaatttgatattttgtaagagagagtttaggaggatggagagatgggatttatagaaaatattatttgaatagaaagaagagtttttttttatatggtttttagtagtgttaggattttatattgtggttgttttgtgggtgttggtttaatattattatttataattttaaattgggttttagatattttttatttggttttgtttttttataaggatttttttgaataagttaatttattttaatattttttttggaaataagttaaaaattgtttaagaaaataggttaaattttgtaagttaggtatatttggtagggaagggaagagtatatataatgtgaagattttggtttgtatttagttatatagtgagttgagtgttttttgtgtgttaggtgttgttttaaggatttagtggggaatagatggatgtttttgtgggtttttttgtggttttgttttaataggagggtattttttgttttttttttttgttttttattattttttttttttttttgttttgtatttataagaaattaattggggatggtaattttttatgtatagggattttaaagatgattaaatgaaattattggtattagttgtggttagtaaagttggtaaattaagtttgttttttgaagaaagatttattgagttaattgttttataaatttttaaagtgatagtattttttttatttaagtaagttttatgattatatttaagaaagttagttttgttaggtagttgatgatatgaatgttagtgttttgaggttttgggtaagtgggttgttagatttttgttttttgttgtgtttggaggaaggtattagagtttagttttttggtttagttttgttgtggttataagagggtgatggtgttttttgagtttgtgtagtttggtagttggggagttaggtttagtgagtggttttaggtggagtgagagtgtaggtttgatattatttaagttttttttgggagggagagatgttgtttttattttgtgtatttttatagtgtttataaggttggtattgtggatattagtttatggaggaggaaattgaggttttaaaaggaatggaatttatattagtagatggttgtaaagttgatgtgtgttttaattgtatgtgatttattttagagtttgtattttttattagaaatagtttgagtgttttggttggttttttgttgagtgttttataaatattatgttatgtattttttatttttagtttatttttgagataggtattgttatttttgatgattatttggggttattgagttttttaaatagatttgtaattgggattagaatttaaaatgatagggatttttttttttttatttttagtgtttttttttttgtattattatatgtatttttttttatttttattttttttgagatagagtttttgttatttaggttggagtataatgatatgattatggtttattgtagttttgtttttttgggtttaggtaattttattattttagttttttgaatagtttggattataggtatatgttattaggtttggttaattttttgtatttgttttgtgaagatagggttttattgtgttgtttaatttgattttgaatttttaaatttaagtgatttgtttattttggttttttaaagtgttgggattataggtatgagttattaagtttggttatatttatttttttatgattagtagataagtgggtatttggagatgaagtagtatattttagggggtttgtaaaaagtatagattttttaggtattgagtttgtaaattttgaatatttgagataggttttagttaatttagaaagtttattttattaagattgaggatgtgtttgtggtataagtttaggaggttttgataatttgtgtttaaggtggttggagtgtagtttggttttatatattttggggagatatgaggtattaattaatatatgtgagatgaatattggtttggtttggaaaggttggataatttgaagttgggaaggggttttttggtgataggtagataagaaataaatggttgaggttaggtgtggtggtttatgtttgtaattttagtattttgggaggttgaggtgggtggattatgaggttaggagattgagattattttggttaatatggtgaaattttgtttttattaaaaatataaaaaaaaaaaaaaaaaaaaattagttgggtatggtggttggtgtttgtagttttagttatttgggaggttgaggtaggagaatggttttaatttgggatgtggagtttgtagtgagttgagattgtattgttgtattttagtttgggtgatagagtgagattttgttttaaaaaaaaaaaaaaaaaaaaagaaagaaaaaagaaataaatggttgtattttttgtatttttagtttttgattagtgtttttaaaggaggtaattaggtatgtatttattttagtgagtagaggggtgattttgaatagaatgggaggtaggtttgttttaagtagtttttagtttgatttatttttttttttagtttagtgattttggggttttaagatttatttgttttttataaggttttgtaaaggtaaggtttagaagtttgtgtgtgttttaattttttatgtaattttaatggtggaaaaggtttaagatttattgatgttatatatttgtgtatttttgtagttattgttttaggttgattaatggtattttttattagggagataattttttagtttgtttttttaattttatttttgttttttttattatttaatttttgtatagtagttagagagagttttaaaaatagattaaattatttttttgtttttagtattttttgatttttgtttgtttttgattttatgtttgttttaatttattgtgttatttattatgttgtagttggattgttaatggtggagggtgtttagttttttggtgttttggataaaatatatagataaaataaggaaagaataaagtaataaaagtagagatttattgaaaatgaaagtatattttatagggtaagaatagtttaagtaaagaaatttaataggttttttatagaagtttttggggtttaaatattttttaaaggttttttattggttatttggtgtatgttttgtgtaaatgaaggagtggtttgtgattagtttgattggttgtggaaagtggttaattagaggttgaagttaaaagttatattttatgttaatgtttgattggttgtggaaagttattaattagaggttgaagtgaagttataaagttatatttttatgtaaatgaagatttggttatttattagtttgattggtagtgggaagggagtaattagaggtatttttagttttttatttgtatatagaaaagttgggattgtaaagggagtagtttttggttttttggttatttggatgtggaaagttggggttttttttttgatttagttttagaaagttagtgtgaattagttttatgttttttgtttttagattttatttttttgttttaagattagttggtttttttttggttttatagtattaagttttttattattttagggttttttattttggtttttttttgtatgaattttttttttttaggtttttgtgtggttggttttttttttttatttatggtttgtttaaatattatttttttagagaagatttttttgattattttatttggaataattttttagtttttttttttaattttttgattttgttttattttttgttattgattttttttttttttttttttttttttttttttgagagagagatttggttttgttatttaggttggagtgtaatggtgtgattttagtttattgtaatttttgttttttgggttaaagagatttttttgttttagtttttggagtagttgggattataggaatttattattatgtttagttaatttttgtatttttaggaaatatggggttttattatgttggttaggtttgttttaattttttgatttgaagtgatttgtttattttggttttttatagtgttgggattataggtgtgagttattatgtttgggttttaattttttttttttttttttttttttttgtttattgattgtagtttttttttattagaatatgtattgttgaaaatagggattttatttattttgtttattatatattaatgtttagatttaggtttggtatatagggtagttataaaatatttgttgaaaaaaatataatatatttataaaatatagatttgtttgtttgtttattgtttgtttttttataggatatgagttttattaatatttagattgtttatttggtttattgtttattttgtatatatgtttgatatatagtaggtttttgtattaagtatgtatttgttttttttttttttttttttttttttttttgagatggaattttgttttgttgtttaggttagagtgtaatagtgtggtttttgtttattgtaatttttgttttttgggtttaagtgattttttttttgaatttattgtagttttttgagtagttgggattttaggtatttgttattatgtttggttaatttttgtatttttagtagagatggggttttattatgttggttaggttgtttttgaatttttaatttggtgatttatttgttttggttttttaaagtgttgggattataggtatgagttattgtgtttagagtttttgtttttttgtatttagatgttttgagattttggggatttgttttttttagagggattgttttaattagggttaattggtttttggagatagtgaagaatttatttaggaggttttttgtaaatgtatgttatttaatttagagtttatatttataaatattttttttattaggtttttttatttagggttagtatttaattgttttgattattttaaggttagatattagatagttagggaaagtttttatataaattttagtatttattgtagttatttaaattaattaattttaaggttgtttattttgttttatttatttttttttatggaaattataataaaggtttttgtttatgtttatttttttttttttttgttttttgattaatttggtgtttttttgtgtggttttgtatggtgtattttgttttttgtttttagaataaagatttttatgttggtatattatgttagattttaggatttttgaaatagttttttgttgggtgtagtggtttatgtttgtaattttagttttgtaggaggttgggtgggtggattatttgaggttaggagtttaagattagtttggttaatatggtgaaatattatttttattaaaaatataaaaattagttgggtatggtggtaggtgtttgtaattttagttatttaaggggttgagataggagaattgtttgaatttgggaggtggaggttgtagtgagttgagattgtgttattttatttaagtttggttgatagagtgagattttattaaaataaataaataaataataataataataataaattttttagtaaatttttgttgaattgatgaataaatttttttagtaggtatttgttgggtattagttatgtgttgtgggattatagagttggattatttgaggttttagttattaaagtgttaagatgtttaaagatggggaagggagagggaggatagatagaaaagtttgtttgatagaggaagtatttgaatgagttttgaaatgagggaattatggattttgaggagttggggtggggaataggtgaattttaggtgaaagtaattggtaaggaaattttgaaaaatatgaaaatagaggtagtagggattttttagtttaaaatttttggtttaatttttatttatttattgggtttattttgtgttttattgaaatagtaaaatggtaaaaataattgtataaatttttttttttttttttttttgagatagagttttgttggagtataatggtgtgattttggtgtattgtaatttttattttttaggtttaagtgatttttgtgttttagttttttaagtaggtgggattataggtgtttgttattatgtttagttaatttttatatttttagtagagttggggtttttttatgttggttaggttggtgttgaatttttagttttaagtgatttgtttatttgtgttttttaaagtgttgggattataggtgtgaattattatgtttggttaattgtataaattttttaagtagagatgtgtatatagattttagtttaaggatgtttattaaagtattatttgttttgaaagtattagaaatagtgttaatgtttatggttatattaagtatgtttttgaatatttttatatttttttaattaagaagtggggtttggttaggagtggtggtttaggtttgtaattttagtattttgggaggttgaggttggtggattatttgaggttgggagtttgagattagttttattaatatggtaaaattttgtttttattaaaaatataaaattagttaggtgtggtggtaggtgtttgtaattttagttatttgggaggttgaggtaggagaattgtttgaatttaggaggtagaggttgtagtgagttgagattgtgttattgtattgtagtttgggtaagaagagtaaaattttgtattaaaaaaaaaaaaaaaaaaaaaaagaagtgggttttgtgtatttttttttgttataggataggattttgattgttttgatggatagtatatgttagaaatgtttttgtgtgattttaaaagttaggttagaatagattatgttatttttttttggttttttttttttttttttttttttttttttttttgagatagagttttattttgtagtttaggttggagtgtagtggtttgattttagtttattgtaagttttattttttagatttatgttatttttttgttttagttttttgagtagttgggattataggtatttgttattatgtttggttaattgtttgtgtttttagtagagatggggttttattatgttagttagaatggttttaattttttgattttatgatttgtttgttttggttttttaaagtgttgagattataggtgtgagttattgtgtttggtttttttggtttttttgaaatatttgtttttgaagttttgagttgatatataagaagtttgattattttgaggtaattatattgtgaagaaatagttatgtttggtaattaatttgttattgtttataattttttttgtttatttatagatatatattttagtaggttatttgtaaggtaggagggaagttggaaatttagagtgtttgtttttttagtttaagggatttaagaatagtgggtattggttgagtgtggtggtttatatttgtaattttagtattttgggaggttaggagtttgagattagtttggttaatgtggtgaaattttatttttattaaaaatataaaaaattagttgggtatagtggtgtatgtttgtagttatagttatttgagaggttgaggtaggagaataggagaattgtttgaattgagtaggtagaggttgtagtgagttgagattgtgttattgtattttagtttaggagatagagtaagattttgtttaaaaaaaaaaaaaaaaaaaaaagaatgggtattagaaagggttgaaggaagggagtgtaaatagttgttttagatgttttttgggggttgtttagtggggtgagtggtaggagtatttgttattttttttatttgttaaaggtatgtttgtattaataaagattttaatttattgagtatatattatgtgttaagtattgagttatgtatgtatttatatatagatattattttatttgatttttatgttaattttaggagttaaatattattttattttatatgtgaggaatttgaggtatagagatattaattgatttgtttaagattatatagttagtgaatggtagagtggagttttagatttagattattggtttttatttagaattttttattgttggaggttttggattatgtaataaggtaagaaaaagaaataaaagatattttaattaggatggaataggtaaaagtgtttttatttattggtaatatgatt

SEQ ID NO: 245 - DNA, 5020 bp, Artificial Sequence
  chemically treated genomic DNA (Homo sapiens)
agtaaagtataattttatatgtagtagtataaaaaatgtttagatgtttagggttttttttaaaattttattattttggaagattaataatagttttattaaataattttatatatgaatgaaaaatggagaaaaattttattaagatgttaattttattaaaatgaaatgggttattttttttttttgttagaaaaaaaaaggttgggaaaataaaatttataagttggttttttttttttttttttttttatgagttggttttaaggttatttttaatatttattttttttaatgatattaatatattgttatttatttgattttaaaattgtaattggttagttttaagtgaatataagtgttatgtttttgtagttttattatatttaatttgtaatttatttaataaaagattttaaatttataatgtatgtatggtgattaaaatatgagtatttttttaagttttgttattataatgtttgtttttttgggagtataatgatatggtttttttttttttttttttttgagatggagttttgtttggttgtttaggttggagtgtagtgatgtgattttggtttatagtaatttttgttttttgggtttaagtgatttttttgttttagtttttggaggaattgggattataggtgtttgttattatgtttggttgattatttgtatttttggtagagatggggttttattatgttggttaggttagttttgaatttttgattttaagtgatttatttgttttggtttttaaatataatgatttgttttaaggttgtaagtatttttattaggtatttatggggtgagtagggtggggtagatgtgttttggaatggggtatagtggataggaagtaatggtttataataatgtgaatgtttttgatgtgtagtgggagttttagaaagtgtggttgaatttgtagtttttaataaatggtttgtttttaaattttagttttaattttttttgagtgataggggtatgttattagtatggggggaaatgagatataagaaatgtttgaaagggaaaaataaggttgggttgttttttttttttggggttaagatagaggtatagaaggtttaggtttgggaggttggattatttttggttggatgttgagttgggtgggagtttaaatagtagggggtttataggaggttggtttaggtagttttgtgtttatttattaggttaggtttaggtatgtttttagtgatagtaggtttaggtatgtttgggggtttgtttagtttttgtttttgttgttttgggttatgggggtttttttgtttttgttttgttttttgggttttgtagtaggggtttttttgggttttgattttttttggttttttattttagatatgtttggagattttaggatgataagtttagggtagtttttttattagggggagtaggatgtggttgttttggtgtttgtgggaattttgggtggtgattgtgtttttttatagatttggtattgtttagagtttagttttttttttttttttggtatttttgttgttttattgagttttttagttgttagttttatagtttttttaggagaggtgggtggtgattttaatttatagtgttttttattgtgatattgttttaaatttgaggaaatttaaatttttgggtgtgtgtaggttgatgggatttgaggaggaggggtaggatgaaggggttgtgtgtgttatgttgggtgtgttgttgttgtttgagtttggtattggtgggaatgtggtgtgtttttgaggtttagttatgttttgtttgtggggtaggtgggtatttttatgtgtgtgggtatgagttgtggtaggagtgtgtggtggtagtggtggttgttttttggggtttggggtgtgtttatttgtataagtgggtgtgtgttgtttgggttgggtggatttggtgggatttgattgttttgttgtttagaggtggagaagaagaggtagtgagtggatgtgattgttttattttgggtaaaagggatagaattagaggtggggagtttgggtagttggtgatttgtgaagatttgaggtgttgtagtggtatttggagtagtgttgggttttttttggggtgtagttgttgttgggggaagggtgttataggttgggaagattttttttttttgtgtttagtagtggggtttattggagggtggtttgtgggttgggttttattgtggtgttttgggattgtggggttaggttgtgttgggtggatgtttattttgttaatttttggaggtttttgggggtttttgtgtgttttggggttgtagagatttaggggaggtgtttgtgaggtttggatttgttttggggtgaagggtatgtggtgagatagagttttgtatttttaatttttggtggaaaatttttgttgttgtttttttttattggtttggagttttttagttttgttttggtagtgttgttttttttattaagatttaggtgtaaaggtttgggtaagttgatttttttgtttttttttttgagttaggttttttggaggtttggtagttgattttagggattgagaatttgaggatatggaatatttgataattattttgtttttgtattaggaagagaaattttgtaatgaggaagtagtaaatttggggtttttgtggataaatgtgtgttgttttttgttttatgtttatgaagagttttggttttttattttgttgtgggttataaaaggttttgagatttagtttagataagttgtgtagttttaaaatgtatttaagatttgtatattttagtttaataggattaggtgaaattggaaattagttttagaaaattagagtgttttatttgtttagttattggatattatttaaaaaatttatttatttttgtttttttatattgaattttattattataaattaaggaatattttatgtttaagaggataaaaatgttattaatattttaaaaaatgagagttttgatttgaattaataattttttattagttttgtgtttttgttgggtattttgtaagttttgataagtataggtaaatgttttatgtttgtttttgtttttttaagtgttatatttggtgattttaaaaatagttattgaagtttgataattattgtttttttttgtgagttttaagttatttgtgttttgtttttgtattttgggtatttatatttttatttttttttttttttttttttttgagtagattgtgaattattttaggtaaatgatttaattttttttgtagttttggtgtttgatatatagggaggggtataaatgtgtattgaatgaatgaattgataaatttgtttagatttttttattttatatattgtgtaaagttttgttaatgttttgaaaatttgtagatattgtgaattgggttttatgtttatggaaaaatttgtattatatttgaaataaagttgttagaaatgttaagtattttattataaaggttgttattttttttttatgtttttttggtttgagaaattatattagaaagtgttttttgttgttttgtgggaaatgtgtttagtaaggaggatttagagttgatattttttttgaatgagaattaatatttaatagtaataatgttttatttatttttatgtttgataaggaaaataagaagttttttaatattaggattttaatgtaattattattttatataattttaattaaaaaaggaagtattttattgtaagaaatgataatgtgtgttaaaaaaaattgatagtagaggttgggtatggtggggtttataagtgtaattttagtatttttggaggttgtggtgggtggattatttgaggttaggaatttaagattagtttggttaatatggtgaaattttgtttgtattaaaaaaaaaaaaaaaataagataaggtgggggagaaattttaaattttgttatttagaagtaatttaaatattttgatgaataaatttttaaatgtttatatatatttatatgatattaatatttgtttttttttttgagatggaattgtattttgttgtttaggttggagtatagtagagtggttttggtttattgtaagttttgttgttttggtttatgttatttttttgatttagttttttgagtagttgggattataggtatttgttattgtatttggttaattttgtatttttagtagagatggagttttattgtgttaattaggatggttttaattttttgattttgtgatttgtttattttggttttttaaagtgttgggattataggtttgaattgttgtgtttggtttttatgttatgtgttgtatgtgggattatgtttttgtttttttttttttttttttttagtaatagtattatgaatatttttttatgttaatatatggagatatgtgttataattttgaatggttgtataatattttattttatatatatattttaatttttaaaatttatatttagaatgatggatatttaggttgtgtttattattgaaatattttttattaatttttttttttttttattttttattttagttttttaatgtgttgggattataggtttgagttattatatttgattggaaatttattaattttttttgtggatatttttatatatgtatttgaatgtttttttgaagtaaatttttagaaatgggatttttgggttagagagaaagtttattttaaataattttatattttattgttttttagaaaaattgtatttattttttagtttttttaattagtgtataagaatggttatttttttatatttttttaagtattgggttttgtttatttaaaaatttttgttaaggaaaaaaaattagttttgttttttttatgttttttgtttattagtgagattatgtatttttttatatttttattggtttgataaatattttggtgttttggttgtagt

SEQ ID NO: 246 - DNA, 5020 bp, Artificial Sequence
  chemically treated genomic DNA (Homo sapiens)
gttatagttaaaatattaaaatatttgttaggttaataaaaatatgaaaagatatataattttattaataaataagaaatgtaaaaagaataaaattgattttttttttttggtaaaaatttttaaatggataaaatttagtgtttggaaaggtatgagaaaatggttatttttatgtattaattggggaaattagaaaatgaatgtaatttttttggaaagtagtaagatatggaattgtttaaaataagttttttttttaatttagaaattttatttttaaggatttattttaaggagatatttaaatatatatgtaaaaatatttataaggagaattaatgagtttttaattaggtgtggtagtttaagtttataattttagtatattgggaggttagagtaaaaaataaaaagaaaaaagaattaatggaggatgttttagtgatgaatgtaatttaaatgtttattattttgaatatagattttaaaaattagggtatgtatataaaatggaatattatgtagttatttaaaattatgatatatatttttatgtattgatatggaaagatgtttataatattgttgttgaaaaaaaaaaaaaaaaaaaatagaaatatgattttatatataatatataatgtgggggttgggtgtaatggtttaggtttgtaattttagtattttgggaggttaaggtgagtagattgtgaggttaggagattgagattattttggttaatatggtgaaattttgtttttattaaaaatataaaattagttagatgtagtggtaggtgtttgtaattttagttgtttgggaggttgagttaggagaatggtgtgagttagggtggtagagtttgtagtgagttgagattattttattgtattttagtttgagtaatagagtgtgattttattttaaaaaaaaaaataagtgttggtattatatgaatatatatagatgtttagaagtttatttattgaaatgtttgagttatttttgagtagtaaaatttgggattttttttttattttgttttattttttttttttttttagtatagatggggttttattatgttgattaggttggttttgaatttttgattttaggtgatttatttgttatagtttttgaaagtgttgggattatatttgtgagttttattatgtttggtttttattgttaattttttttagtatatattattattttttataataaaatatttttttttttaattaagattgtataaaatagtgattatattgaagttttaatattaagagattttttgttttttttattaaatataagagtgaatagagtattgttattattgagtattagtttttgtttaaggaggatgttagttttaggttttttttgttaaatatattttttataaagtaataggaaatattttttgatgtgattttttagattaggaggatatgaggaaagaataatagtttttatagtaaaatatttgatgtttttagtaattttattttaaatataatgtaaatttttttatgggtataaaatttagtttataatatttgtaagtttttaaaatattaatagaattttatataatgtatagagtgaaagagtttaaatgggtttattaatttatttatttaatatatatttgtgtttttttttatatgttagatattaagattatagaaaagattgagttatttgtttgaaataatttatagtttatttaaagaagaaaaagagagagagagtgggaatgtgaatgtttgaagtgtaaaaatagagtataagtaatttggagtttatagaagggggtaataattattaagttttaatgattgtttttgaagttattaaatgtagtatttggaaaaatagggatggatgtagggtatttgtttatgtttgttaaggtttataaaatgtttagtaggggtataaaattgataaaaagttattgatttgaattaaaatttttattttttaaaatgttaataatgtttttgtttttttaaatataaaatgttttttaatttatagtaatgaaatttgatgtgaaaaaataagaatgaatgaattttttaggtgatgtttaatagttaagtaaataagatattttggttttttgaaattaatttttaattttatttagttttgttaaattaaaatatgtaaattttaaatatgttttaaaattgtataatttatttgaattaagttttaaaattttttgtaatttataataaaatggaaagttaaaattttttatggatgtaaaatagaaaatagtgtatgtttatttatgaaaattttaagtttattatttttttattatagaatttttttttttggtataggagtaggatggttattaaatattttatgtttttaaatttttagtttttgaaattagttattaagtttttaaagaatttggtttggggagaaaagtgaggaggttaatttatttaagtttttgtgtttaggttttagtggggagggtggtattgttgggataagattgggagattttaggttggtggagggaaatggtaataggagttttttattgggaattaggggtgtagggttttgttttgttatatattttttgttttggggtaggtttgggttttataggtgttttttttggatttttgtagttttggggtgtatgaagatttttagggatttttgaaggttggtgaggtgggtgtttatttaatgtagtttgattttatagttttggagtgttgtggtgaggtttggtttatgggttgttttttggtggattttattattggatataaagggaggaggtttttttggtttgtggtgttttttttttgatggtggttgtattttggagggagtttggtgttattttggatgttgttgtggtattttaagtttttgtgggttgttgattgtttagattttttatttttggttttattttttttgtttgggatagagtagttatgtttatttgttatttttttttttttgtttttggatagtggagtagttaaattttgttggatttatttagtttggatggtgtgtgtttgtttatgtaaataaatatattttaagttttaaggggtggttattgttgttgttgtgtatttttgttatggtttatgtttgtgtgtgtagaagtgtttgtttattttgtggatggggtgtggttaagttttagggatgtgttgtgtttttattaatgttggatttgggtagtggtggtgtgtttgatgtggtgtgtgtgatttttttgttttgttttttttttttgggttttgttggtttgtgtgtgtttgggagtttgaatttttttggatttggagtaatattgtagtggaaggtgttgtgggttgaggttgttgtttattttttttaggggaattatggagttggtagttgaaagatttagtgaagtaatgaggatgttggggagagggaaggggttgggttttgggtggtgttaagtttgtgagggggtgtggttattgtttagggtttttatgaatgttaaggtggttatgttttgttttttttggtgaagaagttgttttgggtttgttgttttagggtttttagatatgtttgaggtgaagagttggaagaagttggggtttaagggagtttttgttgtggagtttgggaagtggagtgagggtgggaagatttttgtggtttggagtagtggaggtgggggttgggtagatttttgaatgtgtttgagtttgttgttgttggggatgtgtttgggtttggtttggtaagtggatgtgaggttgtttgggttggttttttgtgggttttttgttgtttgggtttttatttggtttaatatttagttggaggtgatttaattttttagatttgggttttttgtgtttttgttttgattttaaaggaaggaaatagtttagttttgttttttttttttgggtgttttttgtattttatttttttttgtgttggtagtatgtttttattgtttagaaggagttgaggttaaggtttgggaatgagttatttgttaagagttgtagatttggttatgttttttgaagtttttgttatatgttagaagtgtttatgttgttataaattgttattttttgtttgttgtgttttattttgggatatatttgttttattttatttattttataaatatttaatggaaatatttgtaattttaaaatagattattatgtttggagattgaggtaggtggattatttgaggttaggagtttgagattagtttggttaatatggtgaaattttatttttattaaaaatatgaataattagttgggtgtggtggtgggtgtttgtagttttagtttttttggaggttgaggtaggagaattgtttgaatttgggaggtggaggttgttatgagttaagattgtattattgtattttagtttgggtgattgagtgagattttgttttaaaaaaaaaaaaaaaagaaaattatattattatgtttttaaaggagtaaatgttatagtagtagagtttggaggagtgtttatattttgattattgtgtatgtattatgaatttaaggttttttattaagtaagttatagattgaatatggtaaagttataaaaatatagtatttgtgtttatttaaaattaattagttgtagttttaaaattaggtaaatggtgatatattggtgttattaggaaaaatgaatattagaaataattttaaaattaatttgtaaaaaaagaaaaaagaaaaaaattaatttgtgaattttatttttttagtttttttttttttggtgggaggagggaatagtttattttattttaataagattggtattttaatagaatttttttttattttttatttatgtgtaaagttatttagtaagattgttgttaattttttagagtgatagaattttagaagagattttggatatttagatattttttatgttattatatatggaattatattttatt

SEQ ID NO: 247 - DNA, 2240 bp, Artificial Sequence
  chemically treated genomic DNA (Homo sapiens)
attgaggatttggaaatgaggtttaagggtagttaaggatggttgtagttttatatgattagttgttaaagtaagttgaggtattgaagatggagaatttaaatttttgataagagttagaagataattttaattattttataaaattggaaattgaggtatttaatatgaaggaagtatttaaataattataaggaagtattgaagatgaagttatggttttttttggatagattgatttattagagtgttttaaagagtttaatttagatagtagtaatttttttggagtaaaattgtggttaaaaatgtttttttgtttttatggaagttgggaaggatttgtattaagttgttttggagagtgtagttttgtttttatgggtttatttttaagaagagggtttgtaaatggaagtagagaaagtattggatatttagaagaatttgagaaagagaggttattgttttttgttgattttgataaagaagaaaaggaaaaagattggtattatgtttaattttagaattttattaaaagaatagatagtttttttttaattgaaaatttttttttataaatagatatgattagaaggtaattggaatatgaagtaaggtaaattagagttgtgatggaagaataattaggtatttgttaggatatggaaaaatgagtatagtgaagaatagttagaatttagtaaattgaaaaggatatattttgtatatgatagtttttatagttttaagtaatagaagtagagaggttattttagaataagtatgaaattggtttatatgatgttgagtggtagaatgaaggttaaggagtgggagaaattaatatggtaatttttggtaatggttagggtttaattatatgaatggattatgaaatagttagtgttttgagttttagtagtatatattttgtattttgaaggttgataagttatttgggaattaaggtggaaatggtgtatttattgttgttaatgtttggtatttatgataaggatgatatgttgtgaattttgttagttatgtttagtttttaagatagttgtatatttatgtgatagtttggatgtttttttttttttatttagtttttatatggtaatgataaagattttgtattgttgggaaatttttggggtagtaaagaggtttgggttagggttagtgtagtattttataatattatttatttatagtttgatgataagagaggtaggtgtgaaatttgagttttttattttttggaatagatatgtgtttattgtgaaatttgttgggagtggtaggaagtttatgaattaggtatggattaggataaaaatttaatgttagtttttgttgaatattagatttgttttgttgtgtgtgttttaatgaaatttttatttgatgaagagtatagatatgtaatgaatgaattagggggattataggttattgtagaattattgtaagtggattgtgaaatgtatgggtttattaatgattattatagtattatattaagatgatatgttggaatggttttgataaatttgatttttggagatgtagttaataaggttatgttatgttttatgaaaggttgtatgagagtatttgtggtttaattaaaatttgaaagtgaagatttatagtaggttattgtaagtgttttgaggaatttgttttggtgagtagatgtaaatagtaaaaagatgttgtgagaagttggaagtgtgaaagtattgatggaatgtgttttagaagttaaaaaggaattaatttttaaaagtgtattgagtgttttatggaatttgttagtatattgtattgagaataaagttgatatatgtgttgtagatggtgtatttgtatttttggttggtatttttatttattggagttagataaatattttagttattattgaaagtggaggtgggatattatggaatgtgtttagtttgatagttataaatgaggattataggtaaattttaagagagaataattgtttataaattttattataatatttaaaattttatagtttgataatagttagtaatgtatgtggaattttgtggaattttttagtaagaaattttaaagattaggaagtattatgggatatgggggtagttagtatgtttaagaattttatttatttaaagtataaaatgattgttatgggaagtgttgtagttttaaggaattttatggtaaataggttt

SEQ ID NO: 248 - DNA, 2240 bp, Artificial Sequence
  chemically treated genomic DNA (Homo sapiens)
aggtttatttgttatgagattttttaaagttgtagtattttttatagtaattattttgtgttttgaatgaatgaggtttttgagtatgttaattgtttttatgttttataatgttttttggtttttaggattttttgttgagagattttataaagttttatatgtattattgattattgttaaattatgagattttaagtgttgtaataaagtttgtagatagttgtttttttttaggatttgtttgtggtttttatttgtagttattaagttggatatattttgtaatattttatttttatttttaataatggttaaagtgtttgtttggttttggtaagtaagagtgttaattaaaaatgtaagtgtattatttatagtatatatattagttttatttttagtgtaatgtgttgataaattttataaggtatttaatatgtttttgagggttgatttttttttaatttttaaagtatattttattaatgtttttatatttttaattttttgtaatgtttttttattatttatatttgtttgttaagataaattttttaaaatatttgtaataatttgttgtaagtttttatttttagattttagttgggttataagtgtttttatgtagttttttatagagtatagtgtagttttgttggttatatttttaaaagttaagtttgttaaagttattttagtatattgttttagtgtaatattgtagtggttattagtaagtttgtatattttatagtttatttgtaataattttgtaatggtttgtagtttttttagtttatttattgtatgtttatgttttttattaaatgaaagttttattagaatatatatagtaggatagatttgatgtttaataggagttggtattggatttttgttttggtttatgtttggtttatgagttttttgttatttttaataggttttatagtaagtgtgtatttgttttaaaagatgaaggatttggattttatgtttgttttttttgttattaggttgtgagtgaatgatgttgtggagtgttgtattggttttggtttgagtttttttattgttttgggaattttttaataatatagagtttttgttattgttatgtaaaagttggatgaggagaggaagatatttagattgttgtatggatatatagttgttttgggagttagatatagttagtaaagtttgtgatatattatttttattatgagtattaagtattgataataatgaatatattatttttattttggtttttagatgatttgttagtttttgaggtgtagagtgtgtgttattagaatttaaaatattggttgttttatggtttatttgtgtagttgaattttgattattattagaagttgttatgttgattttttttattttttgatttttattttgttgtttagtattatgtgagttggttttatgtttgttttgagatgatttttttgtttttgttgtttgggattgtaaaagttgttgtatatgaagtatgttttttttgatttgttgaattttggttattttttgttgtgtttgtttttttatattttggtaggtatttagttgtttttttattgtaattttgatttgttttgttttatattttaattgttttttggttatatttgtttgtaaggaaaaatttttagttaaaggaagattatttatttttttagtgagattttgaagttgagtgtaatattagttttttttttttttttttttgttaagattagtaagaagtaatgattttttttttttaagtttttttaaatatttagtattttttttgtttttatttataaattttttttttggaaatgaatttataggaataggattgtattttttagaatggtttgatatagattttttttggtttttataagaatggagggatatttttgattgtagttttattttagggaaattattgttatttaagttaagttttttaagatgttttaataaattaatttgtttagaagaagttatagttttatttttaatatttttttgtagttgtttaagtattttttttatattagatgttttagtttttagttttgtaagatgattggaattattttttagtttttgttgaagatttgagttttttatttttagtgttttaatttgttttaataattgattatatgaagttgtagttatttttggttatttttggattttatttttgagtttttaat

SEQ ID NO: 249 - DNA, 8759 bp, Artificial Sequence
  chemically treated genomic DNA (Homo sapiens)
tagtttggaagagggtagttaggggagaagttagggttggagttatgagaaaggataagatgagatgatggttttaatattgaggatagaaagaatattgagatgagaaagtagtttattataagtatttatgtaaaggaaatagtagatgtttataaattagtagaggtaataattttgaaagtttatttataagtttttttttttatttttaatttagtttaaatgtaattatttaaattgttttttatttttttttttggattatgaatgagttttttaaatgtagggtttatagtgttttatttattagtgaattttaagtgtttagtatagagtttggtaaatagtaaatgtttaataaatatttgtttagtgtatgaattggagtgattttttattttgtttataagttgaaaaaaggtttattatatatttaaatatgttgaaattatagggtatttggtaattttttaaaattaaaatttttagtttggaaatagaattttaattttgtgaaaataaaatttatttatttatttaaaaaatatttattaaataatgattatgttttatattaggttgagttttaaggatttaatgatgaataaaaattaatatgatttttgtttttaggaaatatatagtttagtgaggaaaatagattgtgagaagttttttaataaatattgggtgttattaaaatatattaaaaggtgagtgggtgagggatttgagttagtttaggtggtttaggaagtttttttggatgtgttgatatgtataggtattaattagataaatagagagaaggatgaattaatattgtaggtagagggaatagaatatgtaaaggtaggaaggattatggagttgttggaggatttgaataaaggttagtgtaagtggattttagaaaataggaggaaaggtgtatgagatgagattagagaggtagattatgtggggtatggttaatgttttggatttttttattaagagtaatggggagatagtgataggatttaaatggggaaataatatgattagattaaattttttaaaaaattttttatgtaaatatatattgagagttaattattgataaagatttaaaggtaataaagtggagagagaatagtatttttaaaaaatggtgttaaaataataggatatttatattaaaagttgggtatttgtttataaaatttaatttaaaatggattatagatttaaatgtaaaattgaaagttatataatttttggaagaaaatatagatgggaatttgtgtgattttgagtttgaaaatgatttattatatttgatattataatttgtaagttaatataatttataagtgaataaagtgatgaattggattttattagaatttaaaatgtttgtgttttaaaagatattggtatgataatgaagataaattatagataagatattgttgaattatatttttgataaaggaattgtgtttagaatatataattttaaaatttttataataaattataagtagtttaattaaaaaaaaaaaaagagaaaaaatttatagtttttattaaagaaagtatataattgtaaaataagtatatgaaaaatgttttgtatttttatttatgggagaaataaaaattaaatgggaaagatatttttaattagaatattaaaattaaaaagattgattatattaagtattggtgaagtggaaatgtaaaatgatataattatttaggaagatgatttggaagttttttataaaagtaggtgtatatttattttgtgatttatttattttatggttaagtatttatttgagagaaatgaaagaatatatttatataaagatgtttatataaatatttatagtagttttatttgtagtagttttaaattgaaaagaatttaaatgtttattaaaagtgaatggataaataaagtgtggtatagtaatgtaatagaatattatttagtaataaagaagaatgagttagtgatatatataatagtttaaatgtatattaaaggtattgtgtttagtgaaagatgtaagtaaaaaaaaaaaagagtatatgttgtatagttttattgatataaaattttggaaagtgaaaaatagtttatattgatagaaagtagattattggttgtttgaggaggaggagtataggagaggtggagggaaaatgtataaagtggtataataaaaatttttggaattatagatatatttattattttgattgagtgatgattttatgagtgtatgtgtgtgttaaaaatgattaatttatgtaattttaaatatgtgtagtttattgtatatattaattatattttagtatggttattaaaaagaaattttttggttgtataatgtagaattgattttaggaaagagtggagggaggatgattatttatagtgttttaggtggaagagaatggtgttttttggaagtgaattaggttggtaataatagagatgaaataaatgggtagatgtgtgagatatttaggaaataaaatttgatggttattattttttaaaggttagtttattttggttttttagagtaaagagttagggaagattttattaataaattttttttgaagttgtagaggaagtttatagtagaaatttatttttaatttgattaatttgagagaatatttttggttttatttgattattaaaaaattgtaaagaataggaggagaaagaagaagaaagttggtataaatagtgaatttatataatattaattaataattgttttttgtttttaaaagtaatgggaagaaaatgagatttgagttggaagattagagtttaaaatttaaataaagtatatggttttaatatgtttatagtagttaattttttttgataatgatataattgttgatagtattatttttaaaaataaaaataatatagtaattttttagatttgtagaatgtttttttgtttataagtttgttttatatatattatgttttttaaatgatatattagttttttgagggtaatttatattggtaatagtttttagatgtggaaattgtgaagataatgttggtgatgtggaagtaatataaattttggagttttttagatttaggtttgaatgttagattgttttttatttagagtaattttagagtattattttttattttaatttttttttaggtttttttgtgtttatgtgttttttttatttttgtttattgtttatttagtgatttttgtatttttttttattgttagtgtgtagatatatagtttttttggttttgagatttatgttaattttattttattattttgttagtttatttaatttttattgagtaatgttagttgaaagttgtggtgggattaaatgttgtaatgagtatttaaatgaggttgaagtatttatgtattttatttatatatggtgaggtatatttaaggaaggttgtagttattaaaattttaggaaataattttttatttttttaggtgaaagggtttttaggtttttgtgttttggaaggtttatttatagttattttttaaatgataatgtgattgatgagtttagagtttagtttaaatagtaatggattggaagattagtttaggttttattaatgtggaatatagaataaattatgtttttgttttagtttgtttatttgtgaaatagagtttattatatttagttttttttgtttttaggtttgagttattttttttggttaaggtaagtaaatgtttatgatgtttggttgtgtataagataaagttataataaagttataatttattttttttttgtagaagattgtaaaaagtaaaagagatttaggtaaaaattttggaatgatttttggaatagagagtttttttagaattagaagttaaaggaatttaaaatatagggaggtttagggtttttattgatataaaggaaagatgttttttttataggtttatgtttatattttttttttttttttatttttatttgtatttttatttttatatagggtttatgggattttttttataaaagagtagttgtagtaatttatattattttttatgtttggttgtttattaagaggtgaaaagtagttttatataggttttatttttggatagttttagttgtaaagtttaaaatatgtgaaggtaatttggaaaagtaagtggttgtatataaagtaaatgtttatagagttttggataaaattgagtgtttatgtgtatatggtaagtgtttttagtgtttgtgtgtttatttgtttgtttgggtgattttgtttttgagagtttggatgagaaatgtatggttaaaggtaattttagataggaagaaaggtagagaagagggtagaaatgatttttgatttttggggttgagggtttttagagtaaatggtataatgttatgaggtttgatttatttttatgatggaatttaaggttttagtaagtatttgttggtttggttatggtttgttttttagtttgtaggagatttttttatttttttatttgtgtgtttttattagttttgaaaagaatttttggtagttaggagtaggtatttttattgtttttttttttttttttttgtttttattttgttggttttttagattgggttttggaattaaatttggtgagtgttggtttttaggaaatttggagttttggtgtttaaattttggtttaggaaagtaggagttatttaggaagtaggggttttttagggttagagttagttttttttgtttttgtttatgttgtgttagtatttgtttttttaaagttattaggtaggtgttagtgtgtggtgaggggaggggagaaaaggaaaggggaggggagggaaaaggaggtgggaaggtaaggaggttggtttggtgggggtgggatttgatttgtaaattgttgtatttgttttttattttttagtgttttttttgagattttggggagttagtttgttgggagagtgggatggtttggagtaagtttagaggtagaggaggtgatagagggaaaaagggttgagttagttgttttagtgttgtataggagttgaagggatgtattatgttagttttagtttggttttagtgatagttaatgttttttgtagtgtggtggttttgaagttgttgtttggagttgtttttttttttttggtgaagtttttaaaagttgttaaagatttggaggaagtaaggaaagtgtttggtaggattgatggttgtttttgttttttttttttttattttgtttttttttattttgtttttttttttttttttgtttttttttttgtagttgttttagttggttatttttagttaattttttttattatttttttttttatttgtttttttgtttttgttggtttagtgttgttagtttgagtttgtagagaggtaattttttttggttgtgagtgggtgagttagttgtatattgtaaagaaggtttttaggagttaggtgattggggagtggttttagtattgtagttatgatttgtttggttaggttgtatgtggagagaattttttgtttttttttattttttttttatttttttttgttttttttattttgagtgtggagttagagattaaaagatgaaaaggtagttaggtttttagtagttaaaaaataaaataaataaaaataaaaaagttgaaataaaagaaaaagataataatttagtttttatttgtatttattttagtggatattgaatttggaaggtggaggattttgttttttttttttaagatttgggtattttttgaatttattttttaagtattaagagatagattgtgagtttagtagggtagattttgtttattgtgtgtttttttttgtatgagattttgaggttgttagagtgttttttgtgtggttgtttttgtaagtttttttttttggagttttttgtaggtgggtagttagttgtagtgattattgtattattatagtttgttgaatttttttgagtaagagaaggggaggtggggtaagggaagtaggtggaagatttagttaagtttaaggatggaagtgtagttagggttgggaagggtttatttttggttgttgtttaagatttattgaggagttttttagaatttgttttagagtgtgtgtgaagtgatttagaatttgggttttaggtatttagaggttgtgagtgtagtattttttggtgttagtttgttgttgttgtagtagtagtagtagtagtagtagtagtagtagtagtagtagtagtagtagtagtagtagtagtagtaagagattagttttaggtagtagtagtagtagtagggtgaggatggttttttttaagtttattgtagaggttttataggttatttggttttggatgaggaatagtaatttttatagttgtagttggttttggagtgttattttgagagaggttgtgttttagagtttggagttgttgtggttgttagtaaggggttgttgtagtagttgttagtatttttggatgaggatgatttagttgttttatttatgttgtttttgttgggttttattttttttggtttaagtagttgttttgttgattttaaagatattttgagtgaggttagtattatgtaatttttttagtaatagtagtaggaagtagtatttgaaggtagtagtagtgggagagtgagggaggttttgggggtttttattttttttaaggataattatttagggggtattttgattatttttgataatgttaaggagttgtgtaaggtagtgttggtgtttatgggtttgggtgtggaggtgttggagtatttgagtttaggggaatagttttggggggattgtatgtatgttttatttttgggagttttatttgttgtgtgttttattttttgtgttttattggttgaatgtaaaggttttttgttagatgatagtgtaggtaagagtattgaagatattgttgagtattttttttttaagggaggttatattaaagggttagaaggtgagagtttaggttgttttggtagtgttgtagtagggagttttgggatatttgaattgttgtttattttgtttttttataagtttggagtattggatgaggtagttgtgtattagagttgtgattattataattttttattggttttggttggattgttgttttttttgttgtttttttatttttatgtttgtattaagttggagaatttgttggattatggtagtgtttgggtggttgtggtggtgtagtgttgttatggggatttggtgagtttgtatggtgtgggtgtagtgggatttggttttgggttatttttagttgttgtttttttattttggtatattttttttatagttgaagaaggttagttgtatggattgtgtggtggtggtgggggtggtggtggtggtggtggtggtggtggtggtggtggtggtggtggtggtggtggtgaggtgggagttgtagttttttatggttatatttggtttttttaggggttggtgggttaggaaagtgattttattgtatttgatgtgtggtattttggtggtatggtgagtagagtgttttattttagttttatttgtgttaaaagtgaaatgggtttttggatggatagttattttggattttatggggatatgtggtaagtttttttttttagaaatgttgttttttggtttagggtagagttattttgtgttttggggtatttagtggtttttatttgtgtgaatatttagattgtttttgggagagtttagtagggtaaatttagagtttttttgtggatttttggtttgttagaggtttaatttgagtttttttaatttttgttgtgtgttttgggtgttgatttttgtttttttagattttttaatttttttaattgttttaaatttttattattttttggtatttgaggttttaaatagaaattttattgtatgggttatttttagagataaagtttttaagttttttattttttttttttttttgtttttaaagtttgagaattttaataggaatttgggtaattttttttttttaggtttgttaggattttatttttagtttgtgtagattagagttaaaaagattggtttaatagttttttagtgggtattttttagagaggtaaagtgaaatttttggttagggaaagaaagtggtttttgggtgttgaggtttgttgtgtgaaagggtgaattttttttttttgaagtaattggggatttgttttagggttggaggttagtagagataatttaaattgttatgtttagagtaggtagaggggtaatttttttggtaaagattttataggatttgtatttatagttttttaatgttggttgattatgttgaaagtagttgtttgggttggtttttttttgtaaagtgtttattttttttgtggattataatagatttatagttttttattttaggtttgtattagatttataaagaggagaatatttttttaatgtataatttaattaggtttgattttgatttataaaattgttggaaaatatttttttgtaaagtattttttgttattttagtgtgttttaaaatttttattggggagggtggagtgaggttttttattatatttttttatttttaggatatgtttgtattttagaatatgtgtagttagtt

SEQ ID NO: 250 - DNA, 8759 bp, Artificial Sequence
  chemically treated genomic DNA (Homo sapiens)
agttaattgtatatattttaaaatgtaaatatgttttaaaaataaaggaatataataaaaaattttattttattttttttagtggagattttggagtatattgaaatagtaggaaatgttttataaaaaaatgttttttaatagttttgtaagttagagttaagtttaattaaattgtatattaaaagaatatttttttttttatagatttgatgtaaatttgaagtagggggttgtggatttgttataatttatagagaaaataaatattttataagagaaaattgatttaagtaattatttttaatatagttaattaatgttgagaaattgtgagtgtaaattttgtgaagtttttattaagaaagttgtttttttgtttattttaaatatgatggtttggattatttttattgatttttagttttggagtaagtttttagttgttttaggagaaagaagtttatttttttatatagtagattttagtatttagagattattttttttttttaattgagaattttattttatttttttggaggatatttgttgagaagttattgggttggtttttttgattttaatttgtgtaggttgaaagtgaaattttaatagatttgaagaggagaaattgtttaaatttttgttgaggtttttagattttgaggataggaggaaaggaagagtggagggtttgggagttttatttttgaaggtggtttgtgtaataggatttttgtttgggattttgagtattaggaggtagtgagaatttggggtggttgggggagttgaagaatttgggagggtaggaattagtatttagggtatgtagtagaaattaggagagtttaggttaaatttttggtaggttgggagtttatgggagagttttaggtttattttgttgagtttttttaggggtaatttgagtgtttgtgtaggtaggagttgttagatattttagaatatagagtgattttgttttgggttgaaaggtgatatttttggaaggaaaaatttattgtatgtttttgtaaggtttggagtagttatttatttaggggtttattttgtttttgatataagtgggattgggatagggtattttgtttattatgttgttagggtattatatattaggtgtggtgaagttgtttttttggtttgttagtttttgagggggttgagtgtagttgtagggggttatagtttttgttttgttgttgttgttgttgttgttgttgttgttgttgttgttgttgttgttgttattatttttattattattatatggtttatataattggttttttttggttgtgaagagagtgtgttaggatgaggaagtggtggttgagggtgatttagaattgggttttgttgtatttgtgttatgtaggtttgttaggtttttatagtggtattgtgttgttgtagttgtttaggtgttgttgtagtttagtgggttttttagtttgatgtgagtgtggggatggggaggtggtggagggggtggtggtttggttagagttagtggaaagttgtagtagttgtgattttggtatgtagttgttttgtttagtgttttggatttgtagagagatagggtagatggtagtttaagtgttttggagttttttgttgtagtgttgttagagtagtttaggtttttgttttttagttttttggtgtaattttttttgaaaggggaatatttagtagtatttttagtgtttttgtttgtgttgttgtttagtagagaatttttgtatttggttaatggggtataaggagtgggatgtatagtgggtggaatttttaaaagtggggtgtatatgtaatttttttgaagttgtttttttggatttagatgttttaatgtttttatatttaggtttatggatattgatattgttttatataattttttggtgttgttagaaatggttgaagtgttttttaagtaattgtttttggaggaagtgggagtttttgaggttttttttgtttttttgttgttgttgtttttggatattgttttttgttgttgttgttgaaggagttgtatggtgttggttttgtttaggatgtttttaaggttagtggagtagttgtttaagttggggaaagtggggtttagtagggataatgtggatggggtagttgagttatttttgtttggaggtgttggtagttgttgtggtagttttttgttggtggttatggtggttttaggttttgggatgtaattttttttggggtggtattttagggttgattgtggttgtgaaggttgttgttttttatttaggattaggtagtttgtggggtttttatgatgggtttggggagaattatttttattttgttgttgttgttgttgtttggggttagttttttgttgttgttgttgttgttgttgttgttgttgttgttgttgttgttgttgttgttgttgttgttgttgtagtagtagtaaattggtgttgggaggtgttgtgtttgtggtttttgggtgtttggggtttgggttttggattattttgtgtatgttttggaatagattttggaaagttttttggtaggttttggatggtggttgagggtagattttttttagttttaattgtatttttatttttgagtttggttgaattttttatttattttttttattttgttttttttttttttgtttagaagagtttaataggttgtgatgatgtggtagttgttgtagttagttgtttatttgtgggaagttttagagaaggaaatttgtgggagtaattatgtaaaaagtgttttgatagttttaaagttttgtgtagaagaagatatatggtggataagatttgttttgttaggtttatagtttgttttttaatatttgaagggtagatttaaaagatgtttagattttaaaagaaaaaaataaaattttttattttttaaatttagtgtttattgaagtaggtgtaaataagaattgagttattattttttttttttattttggtttttttgtttttgtttgttttgttttttggttattgaagatttgattgtttttttattttttgatttttggttttgtatttggggtggggaaggtaggaggaggtggagagagagtgggggaaaatagagggttttttttgtgtgtagtttaattaggtgggttgtggttgtagtgttgaagttgttttttagttgtttggtttttaagagttttttttgtaatgtgtagttagtttgtttgtttgtagttaaagggagttatttttttgtaaatttgggttggtagtgttgggttgatgggggtgggggggtgggtggggagaagggtggtgaggggggttggttgagagtagttgattgaggtagttgtgggagagaagatgggggagggggggaaggtagggtggggggaggtggggtggagaggaggaggataaaggtagttgttagttttattaggtattttttttgttttttttgagtttttagtagtttttaaaaattttattgaagaggaaagggtagttttgggtggtggttttgaagttgttgtgttgtaagaggtgttggttgttgttggagttgggttggggttggtgtggtgtgtttttttggtttttgtatagtattggagtggttagtttggttttttttttttttgttgttttttttgtttttgggtttgttttggattgttttgtttttttagtaagttggttttttgggattttggagggggtgttgggaggtggagagtaaatgtaatagtttgtgagttgggttttgtttttattgggttggtttttttgtttttttattttttttttttttttttttttttttttttttttttttttttttattgtgtgttaatgtttgtttagtggttttggagaaataagtgttggtgtagtgtgggtgagggtaggagaggttagttttagttttggaggatttttgttttttgaatagtttttgtttttttaaattaaggtttaggtgttagggttttagattttttggaggttagtatttattaaatttggttttaaagtttaatttaaaaaattaatagggtggaggtgagggagggaggaaaaggatgataggaatatttgtttttggttgttaggggttttttttaggattgataagagtgtgtagatgggagagtgggagagttttttataaattgaggagtaagttatgattaagttagtagatatttgttgaaattttagattttgttatagggatagattgggttttgtggtattgtgttatttgttttaggaatttttagttttaagaattagaggttatttttatttttttttttgtttttttttttgtttggaattgtttttaattatgtattttttatttagatttttaaaggtaaaattatttagataagtaggtaaatatataaatattaaaaatatttgttatgtatatataggtgtttaattttgtttagagttttgtaaatgtttgttttgtatgtagttgtttgtttttttaagttgtttttgtatattttaaattttataattggaattatttaaggatagaatttatatagggttgttttttgttttttgatggatagttaggtgtagaggatgatgtgggttattgtaattgtttttttgtggaggaggttttataagttttgtgtaaaggtggagatgtaagtgggaatggaaagagagagaaaatgtaaatgtaaatttataaggaaaatattttttttttatgttagtagagattttgggtttttttatgttttaaatttttttgatttttgattttggggaggttttttgttttaaaagttattttgagatttttgtttgggttttttttgttttttgtagttttttatagagaaaagatgggttgtagttttgttgtagttttattttgtgtatagttaaatattataggtatttatttattttgattaaagaaggtaatttaaatttaaaggtaaggaagattggatatgataggttttattttatagatgaataggttgaaataaggatataatttgttttatgttttatattagtaaaatttaaattagttttttagtttattgttatttgagttagattttagatttattaattgtattgttatttgggaaatggttataaatgaattttttagaatataaaggtttgaagatttttttatttgaggaggtgaaaaattattttttgagattttaatggttatagttttttttgaatatattttattatatgtaagtagaatgtgtagatattttaattttatttgaatatttattgtaatatttaattttattataatttttaattagtattgtttaataggaattgagtgggttggtaggatggtagaatggaattaatataggttttagagttaggagaattatgtgtttatatattaatagtgaaggaaggtgtaaaaattattgaatgaataatggataggagtgaagaggatatatagatataaagaggtttgaaaaaaaattaaggtgagaaataatgttttgaagttattttgaataaaaagtagtttgatatttaaatttgggtttgaaagattttaaagtttatgttgtttttatattattaatattgtttttatagtttttatatttgaaaattgttgttaatataagttatttttagaaggttagtgtgttatttaaaagatataatgtgtatagaataaatttgtaaataggaaagtattttataaatttgaaggattattatgttatttttatttttaaagatggtgttgttaataattatattattattaggaaaggttaattattataagtatattagggttatatattttatttggattttgaattttgattttttagtttaaattttattttttttttattgtttttaagaataagagataattattgattaatattatataagtttattgtttgtattagttttttttttttttttttttttgttttttgtagttttttagtaattaaatggaattagaggtgtttttttagattagttaggttgagagtaagtttttgttataagttttttttgtaattttaagagggatttattaataaagttttttttagttttttgttttggaaagttaggatgagttgatttttggaaaatggtgattattgggttttattttttaagtattttatatatttgtttatttattttatttttgttgttgttaatttagtttatttttagaaggtattgtttttttttatttggagtattgtaaatggttattttttttttatttttttttagaattagttttgtattgtgtagttagagggtttttttttaatagttgtattgaggtataattgatatatataataaattgtatatatttaaagttgtataaattgattatttttgatatatgtgtgtatttatgaaattattatttaattaagatagtgaatatatttatgattttaaaagtttttattgtgttattttgtatattttttttttattttttttatattttttttttttaggtaattaatgatttgttttttgttagtatagattgttttttattttttagagttttatgttaatggaattatatagtatgtatttttttttttttttatttgtattttttattgagtataatgtttttgatgtatatttaagttgttatgtatattattagtttatttttttttattgttaagtagtattttattgtattgttgtattatgttttgtttatttatttatttttgatggatatttgggttttttttagtttggggttattataaataaaattgttataaatatttgtataaatatttttgtatggatgtatttttttattttttttaggtaaatatttagttatggaatgggtgagttatagggtaggtatatatttatttttgtaagaaatttttaaattatttttttaagtgattgtattattttatatttttattttattaatatttggtatggttagtttttttaattttagtattttaattagaggtgttttttttatttaatttttattttttttatgaataaagatgtagagtattttttatgtgtttattttataattgtatattttttttgatgaagattgtaaattttttttttttttttttttttaattgggttatttgtaatttattatgggggttttagagttatgtattttgagtataatttttttattagaaatatgatttaataatattttatttgtagtttgtttttattattatattagtgttttttgaagtataaatattttaaattttgatgaagtttagtttattattttgtttatttatgaattatgttaatttatggattatggtgttagatataataaattatttttaaatttaagattatatagatttttatttgtgtttttttttagaagttgtatagtttttagttttatatttaggtttgtgatttattttgaattaagttttgtagatagatatttaatttttaatatagatgttttattgttttggtattattttttgaaaatattattttttttttattttgttgtttttgaatttttgttaataattaatttttaatatatatttgtatagagggttttttagaaagtttaatttggttatattatttttttgtttaagttttgttattgtttttttattgtttttaatagaaaagtttaaaatattaattatattttatatgatttgtttttttgattttattttatatatttttttttttgttttttgagatttatttatattggtttttatttaggttttttaatgattttataattttttttgtttttgtatattttgttttttttatttgtaatgttggtttatttttttttttatttatttagttaatgtttatgtatattagtatatttaggaagattttttgaattatttaggttagtttaagttttttatttatttattttttaatatattttaatagtatttagtatttgttggaggattttttataatttgttttttttattgaattgtatgttttttaagagtaggaattatgttggtttttgtttattattgaatttttaggatttagtttggtgtgggatatggttattgtttaataaatattttttgaataaatgaatggattttatttttatagaattaaaattttgtttttaaattgggagttttggttttggggggttgttaaatgttttgtgattttagtatatttaggtatgtaataaatttttttttaatttatgagtaaagtagagaattattttaatttatgtattgaatgaatatttgttaagtatttattatttgttaggttttgtgttaggtatttggaatttattgatgaataggatattgtggattttgtatttaaggagtttatttatgatttaggaaggagagtgaagaataatttaaataattatatttgaattggattggagatgaaaagaggggtttatgaataaatttttagagttgttgtttttgttgatttgtggatatttgttattttttttgtatagatgtttataatggattatttttttattttaatattttttttgtttttaatgttgaagttattattttattttatttttttttatagttttagttttaattttttttttggttgtttttttttaggtta

SEQ ID NO: 251 - DNA, 5269 bp, Artificial Sequence
  chemically treated genomic DNA (Homo sapiens)
  unsure (460): unknown base
aagttggtatattttggaggaggaggggtttggttagtggtggtaggagggaggttgtggaagttagggtttttgttatatatgtgaagtttgtaatatgttttagaaagaatagatggtatatgtattttaaaaggtaaatgattttaaatggtgttagatttttagttaaattttttttggattagagaaagatttggaaagggaaggagattgtttatagaatataaattttttttgtaaaagatagttttgtataggattattttaaaatatgttagaaatatattttggggtaaaatattttgattgtttttagggttgttatttgttatgtgatgttatattagaattaggttggaatttgttttgagataggtttttattttgttgtttagattggagtatagtggttgtgattatggtttattgtagttttgatttttttgatgtgggaggnttaagtgatttttttatattagttttttaaatagttgggattataggtggttattattatattgggttaaatttttttaaagtagagataagttttttttatgttgtttaggttggtttttaatttttggttttaatttttttattttttaggattataggtgttaggttagattttataggtttttagatttttatgtattaggtatttggtagggggagggattatagtggtagaagagtagtattagtggtttatattatatattttggttttagttggttggggtatataaaattaggtgttattgttaatgattaggtttatagggtattgttgttaaaatttgttgttaataatttttatatattttttaaaatgtttggtaggtggtggtgtgtagtttttaatgtatttgttgttaggtgtttataggtaagggagaaagaagttagatggagtttggagatgtggagggtagatgtaggtgtatttggaaaagggattggtggtgggaggtgtagagggaaaaaggaatgatataattgggttttttagttgttggtggatttgatggggtgttttgtgagggtttggtgagggttttgttaggatagtagtattgtgtttaaggagtgagaggtatttggggttattggagttagatttttaatttgttttagtgggaggtgaagaataatgaaagttttgtatttttatttttttaatggttaatgatattaaaggtttttatatggttatttgttatttgtatatttttagtgaagtgtttgtttatgttttttgattattttttaattggatttttaaaaataattgatttttgagttatttatatattttagatattggttgtatgttagatatatggtttgtaaatatttttttttaggtaaatttttttagtattgttatagggttttttataaagtaaaagttttaaatttatggagtttaatttattaatatttttttttattggttttgttattaatgttaatttaagaattttttgtttagttttagataatagtttgttgttttttaaaattgttttgtaattttatttgttatagttatatttagttatttaatttttatgtaagggttatttttggtgggggggaatttatagatgttttgtttttttagtattatttgtggaaaagattatttgttttgtattaaattgtttttggatttttgtttaaaattagttggattggtttttgttggtaaagttttgtttgaagtttattttaataggtgagaaaaagtttatagtttaatagtttttttttaatttgtaattttgttttgaatttttggattagttttttgattgttgtagatgttaagtggattttgtgttgttttgtgttgggttagttttttatagttggttttttattatgtattgtgtaagtggaatttatgtttgttatttatattttttgtgtttttgtattttgtttttgtgtgtaagttggaatataaaattgtggaggagtgagtttttggggtgtttagttggttgttgtggtagtttttttgagtagtgtatttgttttttaggttgtttggtttgtgtttttgagaaaggtaagttttttttttgtttttttaggggtatttgaaaataataagtgttagataaagtagtagatgttgttgtgtagtagaagtttatgggtgagttgtttttgaaattggaattaggttttttttggtgtgattatgtaagaattatttgtagttttgtgggtttttggtaggttttgtaattgtattttggatagttttgttgggaagttagtattttttaatatagaagaatgaggtttgataagtgtgtgagtttaaaggttgatatagtgtttattattatagttgtgtaggtagttagtgtttaggaagtaatagtggagttatgtagtgtgaaagtaagattgaaatgggtgaggagggtagtagttgttatagttattagagagaaatttgattttgtaggtgtgtggtgatgtttatgagttaggttggtgttgtaatagtagtggtgggattttgagttttgtatggttgttgggtttggatgttttttggtttttggaaatttttattttttttttagtttgaggttaggtggtttgggaaggtggaaggagtgtggaggggagtgggggggggggtttattgtttgagaatgagaattttttttatatttggaaattttagttattatgtgtgttttttattaatttttttttttttattttttttttgatagagatggtggtttttttatgttatttaggttagttttgaatttttgtgtttaagtgatttttttattttgattttttaaagtgttggaattataggtatgagttaatgtgtttggttgttttattaattttttatgaatgaatttgtatatatattttttagagtaggaagtaatgtaaaatagaataattagtaatgtatattttttaatgtgggatgttggtggttaagagatatttggtttttattggaatttttgatattaatatggagtttataatagttgtggagagtgtagataaggttaggatttttgtgattagagaatttttagtgtgtgaagatttaaggaaagttggattgttgatttttgttaataaataagatgtgaaagattgtattattgtagtagaaattttttagttttttaagttaaattttattaaaggttattattgttaaaggaattgtgtttaggatttggatagttgatgttattatttaatattagatgatattaattaattatattttatagattggaataaagtgttagattttatttgaaagttgtaaaaatgaatggtttagatatatgtatgtatttattttatattaattttaaatatttattgtattaatttttttggttttttttaattaagaatataaaattatttatttaaattttgttatttaagtttagaatatttttagaattatattattttaaagaagttagattagaattagaagtaagttaagtttgaagatataataattagtaataatattttttttttttaaatgaaaattttaatatggggtgggtatgttgtgttatatttgtaattttaatattttgggaggttgatgtaggaggattatttgaatataggagtttaagattagtttggataatatagtaaaattttgtttttataaaaaataagaaaattagttgggtatggtgttatatgtttgtagttttagttatttgggaggttgaggtgagaggattgattgattttaggaggttgaggttgtagtgagttatgattgtatgattgtattttaatttgagggatagagtaagattttgatttaaaaaaaaaaaataaaaaaaaaaaaattattattaaaattttaatatggatatattatttttttatgggatttgtatattttaaaaagggtttttttttttagtattgggagagtatgtgtttaattatgtagttagtaagataggttagtttatatagggagtgtgttatttataaaaagttttttttttttttttggtattgtatatgatataattatagttgtatttgaagagaagtgtattttaaggattattattatttagaaatatgtataaatttttatatttagtgttataggaatgatattgttttgtattatttttatttttgtttagaggttagttatgtggtttgtttgtatggtgtttagaattttttttatttgatttaggatgtttttgaagtagtttttttgggtagttgtttggtatttaggatatatttgtgagaaaagttttttataaatttaatttattatgtttatttttgaatttaaaaagtttattgattgtttaaattttgaaattttttttatttttataaggttgaattaaaagtattttgttaaaggtagtagttatggtaaaagaaaaattattgttttgtagaaaaatttatttaatatttataattttttttaattagagattagattttgaagagaaaggtttatatatatatatatatatatatatatatatatatttttttttttttttttttttttttttttttattttattgttattgtgattaaggatttatgaattaagattttttttttagtttttggtggtatatggtgatagtatgtttagagtaaaggtgttttttatgttttttttggggttgtattgattgtaggtattttttttttttatattttatattattgatattaaaaattttttttttttttttgtattgatgattttgtagttttaattagggtggtggtgttattttaaatgttattttggtatttagttttatagagtggggaaaatttttttatttgtttttttttgattgtttagttttttttaattaaaattttaattttataagtgaggaaatgagagtgttttttgtaggggtgtagtgagaatttaataaaatagtttaaggaaagaaaataaaaggtagtattgttgtattttttagatggtaaaaagtaaattattatgtttgtttaatatatattatttgttggttttttggtttagtaggttgaattgtgtgtttgggaattttttttttgttgtgtgtatttttttatgttatagggtggattttttttagagttttagtggagtagttggttaggttgatatgatttgataatattgtaggttattattattattttttattgttttattttttttttagg

SEQ ID NO: 252 - DNA, 5269 bp, Artificial Sequence
  chemically treated genomic DNA (Homo sapiens)
  unsure (4810): unknown base
tttaggaagaaagtgagatggtgagagatggtagtggtaatttataatgttgttagattatgttagtttggttagttgttttattaggattttgaagagagtttattttgtgatgtaaaggggtgtatatagtgagaagaaaatttttaggtatatagtttagtttgttagattgagggattagtaggtgatatatattaaatagatatggtggtttgttttttattatttagaaagtgtagtaatattattttttgttttttttttttaaattgttttattaaatttttattatatttttataagaaatatttttatttttttgtttgtaaaattaagattttaattgaagaggattgaatagttaaagagaaataggtgagggaattttttttattttatggggttgaatgttaaggtgatatttagagtgatattgttgttttggttaaagttatagagttattagtataggagaaaggagggggtttttggtattagtggtgtgggatgtagagaggggaggtatttgtagttagtgtagttttagaagaggtatggggagtatttttgttttgagtatgttgttattatgtgttattaagagttgagggaggggttttagtttatgaatttttagttataatgatagtggagtaaaaaaaaaaaaaaaaaaaaaaaaaaaaaaatatatatatatatatatatatatatatatatatgaatttttttttttaggatttaatttttgattagaaaagattgtaaatattgaatgagtttttttatagaatagtggttttttttttgttatggttattatttttaataaagtatttttaatttagttttatggaaatagagaaaattttaggatttgaatagttaatgaattttttgagtttaggaataaatatagtagattaggtttgtaagaaattttttttataggtatattttaaatattagatagttgtttagggggattgttttagaagtattttaggttagatggaaaaagttttaggtattatgtagatagattatatagttggtttttggatagaggtaggaatagtataaggtaatgttatttttgtggtattaggtatagaaatttatatatgtttttaggtgatgatggtttttaaaatgtatttttttttaggtatagttatgattgtgttatgtataatattagaaagagaagagaggttttttgtgaatagtatattttttatataaattagtttgttttgttggttgtgtagttgaatatatatttttttagtattggggaaaaggattttttttagaatgtgtaagttttatgagagagtaatatgtttatattagagttttggtggtggtttttttttttttgttttttttttttgagttagggttttgttttgttttttaggttggagtgtagttatgtgattatgatttattgtagttttaattttttgggattaattaatttttttattttagttttttgagtagttgggattataggtatgtgatattatgtttagttaatttttttattttttgtagggatagggttttgttatgttgtttaggttggttttgaatttttgtgtttaagtgatttttttgtattagttttttaaagtgttgggattataggtgtgatataatatatttattttatattagagtttttatttgaaaaaaaaaaatgttgttgttggttgttatatttttagatttaatttgtttttaattttagtttggtttttttaagatagtgtgattttaagagtgttttaaatttaagtggtaaaatttaagtagatgattttatatttttgattaaagggggttagggaggttaatatagtaaatatttgaaattgatataaaataaatatatatatatatttaaattatttatttttgtagtttttaggtaaaatttagtattttattttagtttatgagatgtggttagttgatattatttaatattaagtaatgatattagttatttaaattttgggtataatttttttagtaatgatgatttttaatagaatttagtttaaaaaattaggagatttttgttatagtgatgtaattttttatattttatttattaataaaaattaataatttagttttttttaggtttttatgtattaagagttttttagttatagaaattttagttttgtttgtattttttataattattataaattttatgttagtattaagagttttagtaaagattaaatattttttggttattaatattttatattaggaaatgtgtattattaattattttgttttatattattttttgttttaggggatgtatgtataaatttatttatagaaaattggtaaagtagttgggtgtattggtttatgtttgtaattttagtattttgggaagttaaggtgggaggattgtttaagtataggagtttaagattagtttgggtaatatagggagattgttgtttttattaaaaagaaaataaaagaaaaaaaattggtaaaggatatatgtgataattgaagtttttagatgtgaagagaatttttatttttaggtagtggatttttttttttatttttttttatattttttttatttttttaggttatttggttttaggttgagggggaggtgaaagtttttaggaattagagggtgtttaaatttagtggttgtgtggagtttaaggttttgttgttgttgttgtggtattagtttggtttatggatattattatgtatttgtaaggttaggtttttttttggtggttgtggtggttgttattttttttgtttattttaattttatttttatattatatgattttattattattttttgaatattagttatttatgtagttgtaatagtggatattgtgttaatttttaagtttgtatatttattaaattttgtttttttatattaaaaagtgttagttttttaatgggattatttaaagtgtagttgtaggatttgttaggagtttgtagggttgtgggtggtttttgtgtaattgtgttaagaaagatttggttttagttttagggataatttgtttataaatttttattgtgtaatagtatttgttgttttgtttgatatttgttgtttttaagtatttttaaaaaagtgaaagaaagatttattttttttggaggtatgaattaagtagtttagaagataaatgtgttgtttggagagattgttgtggtaattaattggatattttaagagtttatttttttgtggttttatattttgatttgtgtataggagtggggtgtgggggtgtagggagtgtgggtaataggtatagattttgtttgtgtaatatgtggtaagaaattagttgtgaggggttggtttaatgtagagtggtgtgaggtttgtttggtatttataataattgaggggttagtttagaagtttaaggtggggttataggttggggaggaattgttaaattgtggatttttttttatttgttggaataagttttaggtaaaattttgttaataaaaattggtttaattgattttagatgaaagtttaaaagtagtttaatgtaggatagataattttttttataaatgatattgaaaagataggatatttatagatttttttttgttaaaaataatttttatataaaaattaagtggttagatataattgtgatgagtaaaattataaaatggttttaaaaaataataaattattgtttaaggttaggtaaaaggtttttaaattgatattagtggtaagattggtaaaaagaaatgttgatgaattagattttataaatttaaaatttttgttttgtgaaagattttgtaatgatattgaaaaggtttatttaggagaaaatatttataagttatatatttggtatataattagtatttagaatatgtaaataatttaaaaattaattatttttaaaaatttaattagaaaatagttagaagatataaatagatattttattgaagatatgtagatggtaaataattatatgaaaatttttaatgttattagttattagagaaatgggaatatgaggtttttgttgttttttgttttttattagggtgggttgagggtttggttttagtagttttgggtgttttttattttttgggtgtaatgttattattttggtagaatttttgttgaatttttgtaggatgttttattgggtttgttagtggttaggaagtttgattgtgttgtttttttttttttttgtgttttttattgttagttttttttttaaatgtgtttgtgtttgttttttatatttttgagttttgtttggttttttttttttttgtttgtgagtgtttggtggtggatgtattgaaagttgtgtattattgtttattgagtgttttggggagtgtgtggaagttgttggtagtaggttttgatagtagtattttatgggtttagttgttgatggtagtatttggttttgtgtgttttagttagttgaggttagggtgtgtggtgtgggttattggtattgtttttttgttattataatttttttttttattaggtatttggtgtgtagaagtttaaagatttgtgaggtttagtttggtgtttgtaattttagagaataaggaggttgaggttaggagttagagattagtttgggtaatatggggagaatttgtttttattttaaaaaaatttagtttagtgtggtggtggttgtttgtagttttagttatttgggaggttgatgtgggaggattatttganttttttatattaaggagattgaggttgtagtgagttgtgattatagttattgtattttaatttgagtaataaagtgagaatttgttttaaaataaattttaatttgattttggtatagtattatatgataggtagtagttttaagggtgattaaagtattttattttaaaatatatttttgatatattttggaatggttttgtgtaaagttattttttgtgagggaaatttgtgttttgtggataatttttttttttttttaggtttttttttgatttgggagagatttaattaagagtttgatattgtttaaggttatttattttttgaggtatatatgttatttattttttttgaagtatattataggttttatatatgtaataagaattttggtttttataattttttttttgttattattggttaaatttttttttttttaaaatgtattggttt

SEQ ID NO: 253 - DNA, 4558 bp, Artificial Sequence
  chemically treated genomic DNA (Homo sapiens)
taattttaggtgattagttagttttggttttttaaagtgttgggattataggtgtgagttattgtgtttgattaattttttttttttttttttgagatggagttttattttgttatttaggttggagtgtagtggtgtgattttggtttattgtaagttttgttttttgagtttatgttatttttttgttttagttttttatgtagttgggattataggtgtttgttattatgtttggttaatttttttgtatttttagtagagatggggttttattatgttagttaggatggttttaattttttgattttaggtgatttatttgttttggttttttttttgtgtatttttaaaagagatggggttttgttatgttaggtaagttggttttgaatttttgattttaggtgatttgtttgttttgggtttttaaagtgttgggatgggattataggtgtgagttattgtgtttggttttttttttttttttttttttttttttagagatagattttttttttgttgttttggtgtaattatagtttattgtagttttgattttttgggtttaagtaatttttttattttagtttttttagtagttaagattataggtatataatattatgttttgttaattttttttttttttttttttttttttggtataagtagggtattgttgttgtttaggttggtttggaatttttgtatttggttttaagtgatttttttgttttggttttttaaatggttgggatgggattttaggtgtgatatattgtagttggttgttttttttgttgttgttgagataaggttttgttttgttgtttagggtggaatgtagtggtgtaaatatggtttattgtggttttgattttttgtgtttaggtgatttttttgttttagttttttaggtagttgggattattaaatgtataggtgtgtattattatatttagttaatttttaatttttttttgtagagatatggttttattttgttgtttaggttggttttgaatttttgggtttaagtaatttttttattttagttttttaaagtgttgggattataggtgtgagttattgggtttagtttttattgagttttaatttttgtttatttgattattatttttaggattttaaatatttagagattattaaggtgtatggtgtataggtttaaattgtaggttgaattttaatttagtattagtattttttaatgtgattatagaattgattattattatttattttttttgagatggagttttgtattgttattagggttggagtgtaatggtgtaattttggtttattgtaatttttattttttaggtttaagggatttttttgttttagttttttaattagttgggattataggtgtttgttattatatttagttaattttttgtatttttagtagagatggggttttattatgttagttagaatggttttgattttttgattttgtgatttgtttgttttagttttttaaggtgttgggattataggtgtgagttattgtgtttggtttagaattgatgattaatttagttgagtttttgtttatttgaatgggtattgttaatagtatttatttataagagttgttgagaagatttaatgagataaatagttgttaaagtgttaggtatgtagtagtgtttaagaaattttttattttgggttttttattggtattgattgatgtagaggtgggggagaagattaaagataaggattgagaattagggatgggaaaagtagtgggttattgatagttgttttgtttgtttgggaggtggggtggggaaagtgggtgggatatgtttttgggtttggtttatttagattattttataggttgttggtttgtgtgtttgtatttggtggttatagagtaattttttttagagggagttgattggagttgggtgttgttggtatttttatgattattggagttttgtgggttttttgggttgtatagggataagtaaaggttatatttagatgttgggaatgtattgatgtttatttttggaaattgggtttttatttagtttttgggagtagtagttgttagttttttgggatttttatttttattttgttgagttatttgggttgggttaggattttggtaggtaagttggaagggttttgtttatttttttagattttagtagttttagttttagggtggggtagggagtttgttgggagttgggtggggaaggggaagtttaaggtttttttgggtaggtttgttgttttggttggggatttgattttgttatgtttgtttttggttgttttttatagtttttttttttggtttagttttggatgttggagaattgtaagaattgggttttttaatagtttgggagatgggagtggaggttagagttaaggttaagggtagagagagaatttttttagtgtttgttgttgtttaatatttttagattgggtttagggtttggttaggtatgtatttttgggtaatatttattggggtttagtaagtttaggaagttgggggtggttttttttattgggaatttaggttatttggatgggggaggtagagttaggtttgagttagtataggttgttggttttggtgggtgttttgaggttttatttgttttttttggaagtttggggtgttggtagagggagttggaggtgtagttagtattttttagttttattgttttgggggtgttgggttttggagattggggaagaaggaaggttattttatgtaaggagttatggggggtgggaggtaagtaaaattttttttttttgttttttgaaatggagttttgttttgttgtttaggttggagtgtagtggtgtaattttggttgattgtaatttttgtttttaaggtttaagtgatttttttgttttagttttttgagtagttgggattataggtgtatgttattatgtttagttaatttttgtatttttagtagagatggggttttattatgttggttaagttggttttgaatttttgattttgtgggttattatgtttggttgtaaagttttgttttaataaggttttgtttttagaggtggaggagaggaaggtttgtttttattttgtttttgtttggtagattgaggaggagtggggagttgggtgagggtataggtggtttagtttttttttatttttttttgagagtttttggggtatttttgaaaatatttttaggtttagtggaaggagggtgggtgaaggtttttaggttttgggtggtgggggtggggttgtgtgtttggtttagggtggggttgtatattttttttttttgggataggaggagggtgttttttttttgagggttggaggttgtttggggaaatggggttttgggaggggtgtaaattgaaagtgaaatagttgatatttaggaaatatttgttttgatgaggggttatagtaggttggggttgtggttaggattaggtaaagaggaaaattggggttggggatagaagattaggtgtgtggtgggagtatgaggtaggttatggggttttaaagaaggttttgattttgagggttttttttggttattgtaaggtagtagtggggaaggtatagataggaggtaaatagggaaagttgttttgagaaagaatatattttgaggtttataaattggaaaagaaattttgtatgtgtgttgagtatatggatttatggagatttagataaataatttgattttttgtgattaatgatgtgattttgggtatttaattttttgtgttttattttttttgtttgtaaagtgggtatgatggtgtttattttgttgggtttatgtgagtttttagtgtttattatttatagagtgtttttaagtgggagagtatattttaggtttttaggaaatgtttgtggttaatagtttagagttaaaaaataggtgtgttttggttagttagagggaagtagggtttttgaggatagtttttatgggttattggttgggtagtggtttgtttgtaataagtatgtgttgggtgggttgtaggaggttttaggaatagttaaaaattttttaggtttttgttttaggagtggtatgaatttgagagttagtgggtattgttgtagttatattttttttgatggtgtagatattttagtttgtttttggttgttttatttttttattttgttttttttaaagagggagtgtttagtaagttgtttttttttagtagattttattgggatttatgttggagtaagaataaaaagttttagaggaggttaggtatggtggtttatatttgtaattttagtattgtggatggttgaggtagatttatgaggttaggagtttgagattggtttggttaaagttttagaggattaagggtttttttgggaatgggggatttttttttttatgtggatatggtaatttgtatggggtttttagttataggtttgtgtttatttttatttttgtttttttttgtttttttttgtagg

SEQ ID NO: 254 - DNA, 4558 bp, Artificial Sequence
  chemically treated genomic DNA (Homo sapiens)
tttgtggggaagggtgagaaaaagtagagatgggggtgagtatagatttgtgattggggattttatataggttgttatgtttatataggagagaggattttttatttttagaaaggtttttagttttttgggattttggttaggttggttttaaatttttgattttgtgagtttgttttggttatttatagtgttgggattataggtgtgagttattgtgtttggttttttttgggattttttatttttattttagtatgggttttagtgaagtttgttgggaggaaataatttattgaatattttttttttgagggagatagggtaagaaggtgaggtagttaagggtagattgaggtatttgtattattgaggagggtgtggttgtagtagtgtttgttggtttttaagtttatgttatttttggggtaagagtttggggggtttttagttgtttttggggttttttgtagtttatttagtatatgtttattgtaagtgagttattgtttagttaatggtttatgaaggttgtttttagaggttttatttttttttggttggttagaatatatttgttttttaattttgggttgttagttgtaaatattttttgagagtttaagatatatttttttatttaggagtattttgtgggtggtgaatattggaaatttatatgaatttagtagggtgagtgttattatatttattttataggtaggaaaagtgaggtataaagagttgagtgtttgaggttatattgttagttatggaaagttaggttgtttgtttgaatttttgtgagtttatgtatttaatatgtatgtaagattttttttttagtttgtggattttagagtgtgtttttttttagggtaattttttttatttattttttgtttgtgttttttttattgttgttttgtagtgattggagggagtttttaggattagggttttttttgaagttttataatttgttttgtatttttattatatatttggttttttgtttttggttttaatttttttttttgtttggttttgattgtagttttaatttgttgtgattttttattagggtgagtgttttttggatgttagttgttttatttttagtttgtattttttttagagttttatttttttaggtagtttttagtttttagaaggagagtgttttttttttattttagagggagggggtgtgtagttttattttgggttaagtatatagttttatttttattgtttagggtttggggatttttgtttattttttttttgttaggtttgggagtgtttttgaaagtgttttaagagtttttaagaaggggtggaggagggttggattatttgtgtttttatttagttttttatttttttttgatttgttggatagggatagggtgaaggtagattttttttttttttatttttaggggtaaggttttgttaaaatagaattttgtagttgggtatagtggtttatgaggttagaagtttaagattagtttggttaatataatgaaattttatttttattaaaaatataaaaattagttgggtatggtggtgtgtgtttgtagttttagttatttgggaggttgaggtaggagaattgtttgaattttggaggtggaggttgtggttagttgagattgtgttattgtattttagtttgggtaatagagtgagattttattttaaaaaataaaaaaaaagagttttgtttgttttttattttttgtagttttttatataagatggtttttttttttttttagtttttaggatttggtatttttaggatagtagggttggaggatgttgattgtatttttaattttttttattaatattttaggtttttgaggggagtaggtagagttttagaatatttattaaggttagtaatttatgttgatttaggtttagttttgttttttttatttaagtggtttaaatttttggtgaggggagttatttttgattttttgggtttgttgggttttgatgaatgttgtttagggatatatgtttggttaggttttggatttagtttagggatgttgggtagtagtaagtgttgagaaagttttttttttgtttttgattttggttttgatttttatttttattttttagattgttaaaggatttagtttttatagttttttggtatttagggttgggttaagaggggaagttgtgaggggtagttagaggtaggtatggtaggattaggtttttagttggggtggtagatttgtttagggaagttttgagtttttttttttttatttggtttttggtaggttttttgttttattttggggttggggttgttgagatttgggaggatggataagatttttttagtttatttgttgggattttggtttaatttgggtggtttagtagggtggagatggaggttttgaggggttggtggttgttgtttttaggggttgagtgggagtttagtttttaggaatgggtgttagtgtatttttggtatttggatgtagtttttatttgtttttgtgtagtttgagggatttgtgagattttagtgattatagaggtgttagtggtatttggttttaattagttttttttagaggaagttgttttgtggttattggatgtagatgtataggttgatagtttgtagggtgatttgggtgggttaggtttaggagtatgttttgtttattttttttattttattttttaggtaggtagggtggttgttagtggtttattgttttttttatttttgatttttaatttttgtttttgatttttttttttatttttatattaattaatattaataaaaaatttagggtgagaagttttttaagtattgttgtatgtttggtattttagtaattatttgttttattggatttttttagtaatttttgtaagtgagtgttgttgataatatttatttagatgaatagaggtttagttgggttaattattagttttgggttaggtgtggtggtttatgtttataattttagtattttgggaggttgaggtaggtagattatgaggttaagagattgagattattttggttaatatggtgaaattttgtttttattaaaaatataaaaaattagttgggtgtggtggtgggtgtttgtaattttagttagttggaaggttgaggtaggagaattttttgaatttgggaggtggaggttgtagtaaattaggattgtgttattgtattttagttttggtgatagtgtaagattttattttaaaaaaaataaatagtaataattagttttgtagttgtattggggaatattaatattagattgagatttaatttgtaatttagatttgtgtattatgtattttggtggtttttggatgtttgaaattttgaaggtgatagttaagtaaatggagattaaaatttaatagaggttgggtttagtggtttatgtttgtaattttaatattttggaaggttgaggtgggaggattgtttgagtttaggagtttaagattagtttgggtaataaagtgagattatgtttttataaaaaaaaattagaaattagttgggtatggtagtgtatatttgtgtatttggtggttttagttatttaggaggttgaggtaggaggattatttgagtataggaagttgaggttatagtgagttatgtttgtattattgtattttgttttgggtaatagagtaagattttgttttaataataataaaaaaggtagttagttgtggtgtgttatgtttagaattttattttagttatttgggaggttaaggtaagaggattgtttgaggttaggtgtaggagttttaggttagtttgggtaatagtaatattttgtttatattaaaaaaaaaaaaaaaaaaaaaaaaaattagtaaggtatggtgttgtatgtttgtggttttagttattggggaggttgaggtgggaggattgtttgagtttaggaggttgaggttgtagtaagttatgattgtattagggtaatagagggagagtttgtttttagaaaaaaaaaaaaaaaaaaaaaaaaggttgggtatggtggtttatgtttgtaattttattttagtattttgggagtttgaggtaggtagattatttgaggttaggagtttaagattagtttgtttaatatggtgaaattttgttttttttaaaaatatataaaagggaggttaaggtaggtggattatttgaggttaggagattgagattattttggttaatatggtgaaattttgtttttattaaaaatataaaaaaattagttgggtatggtggtaggtgtttgtagttttagttatatgggaggttgaggtaggagaatggtgtgaatttaggaggtagagtttgtagtgagttgagattatgttattgtattttagtttgggtgatagaatgagattttgttttaaaaaaaaaaaaaaaaaattggttgggtatggtggtttatgtttgtaattttagtattttgggaggttgaggttggttgattatttgaggttg

SEQ ID NO: 255 - DNA, 5518 bp, Artificial Sequence
  chemically treated genomic DNA (Homo sapiens)
gtataaattatatttttaagagtggggagaatattgtaaagtatttttttaagtggggtggaggggagaatatattatattagttagagtggggtaggaataaattattatggtggaatgttattagttaaggttatttttattttttttgtggatttttagttgtttttggttatttggatgtgtatgtgtaggttataggggatatgatggtttagtttgggtttagaggtttgatatttattatatggtagttggttttttttaaaggaagtgatttgaaagggaataaggtggaagttgtagtggtttttttgatttgttttgtgaaattatattttgttatttttataatatttttttggttatattgtttagttttattgagtgtgggtagagattatatagtagtatgaatatttggaggtgtgattttttaggtgttattttggatgtgggtttaatagttttgatttagtatttttattattataaagagtttggttgggtgtggtggtttatgtttgtaattttagtattttgggaggttaaggtgggtggattatgagggtaagagattgagattattttggttaatatggtaaaagtttatttttaataaaaatattaaaattagtagggtgttgttatatgtttatagttttagttatttaggaggttgaggtaggagaattatttgaatttggaggtggaggttgtagtgaattgagattatattattgtattttagtttggtgatagagtaagattttgttttaaaaaataaaataaagtaaaataaaataaaatatataaaaaagagttttagttaggtatagtgatgtatgtttgtagttttagtattgtgggaaattgaggtaggtggtttatttgagtttaggggtttgagattagtttgggtaatatggtaaaattttttttttataaaatatataaaattagtagtgtatagtggtatatatgtgtagttttagttattttagaagttgaggtgggaggattttttgagtttaggaggttgaggtggtagtgagttatagttgtgttattgtattttagtttggatgatagagggagattttgttttaaaataaataaataaaaataaaaataaatagttttgattttataattagttaaaaagtgtatttttttatttagtgattgtattgtttagaggtgtatatttgtattaaaagttttttttttttttttttgtaattggagtagggaagggttattttttgttatgattggaagttttttgaggtttttttagaagtagaagtttgtgttatatttgttgtatatagtttgtagaattatgagttaattaaattttattttttttttttttgagatgaagttttgttttgttatttgaggtggagtgtaatggtatgatttttgtttattgtagtttttgttttttgggtttaagtgattttttggttttagttttttaagtagttgggattataggagtatattagtatgtttagttaatttttgtatttttagtagagatagggttttattatgttggttaggttggttttaaatttttgattttaggtgatttgtttgttttggttttttaaagtggtgggattttaggtgtgagttattatgttggttaaggatatggttttttatagagattttgttttttaaatttataaattgttggaaattttattagtaaaaatgaaatatttgagttttgttgataggatttaatttatttgatatagagtagtagttttgatttttaaagtaggtgtatagttttagataaagggtttttggatgtaatattttatatgtatttttttgtttttagtgatttaggatattggttttattttatagttttgatttaatgttgattttgttttgttttaagttattatttggttgttatttaagttttattttttttttttattttggttttttttttttttttttttttttgagataggttttttttttgttatttagtttgattgtagtgatgtaattgattatagtttatggtagttgggattttttaagtttaaataatttttttattttagttttttaagtagttgggattataggtatgtattattatatttagttaatttttttttttttttgtttttttttttttttgtttttttttagatagaggtttgttttgttgtttaggttggggtgtagtggtatgattttggtttattgtaatttttgttttttgggtttaagtgatttttttgttttagttttttaagtagttgggattgtaggtatgtgttattatttttagttaatttttttgtatttttagtggagatggggttttgttatgttggttaggttggttataaatttttgattttagatgatatatttattttggttttttatatagttggtattataggtgtgagttattatgtttggttttttttttttttttttgttttttagttgatatagggttttattatggtatagtttaggttggttttgaatttttggttttaggtgatttttttgttttggttttttaaagtgttgggattataggaatgagttattatatttggtttttttttttaatttttaaaataaattgattttttaaggttaagaggaaatattttttttgagaagttttttttgaatgttagaggtagataatgtttgatttttgtatgttttttaatatttaattatatagttattgaataatatattttgagagataattatgaattaagtaatatgttggtttttgggagaattgaggataaattaattttgtggaaattttgggtggatgaaaaaaattaatatgaaattaaaatattgtatatatttatagttgtgagaagtattatatattttgggtgttatgtgagttttttttttttttttttttttttttgagttggagttttttttttgttattgaggttggagtgtaaggttatgattttagtttattgtaatttttgtttttagatttaaatgatttttttgttttagtttttgagtagttgggattataggtgtttgttattatatttggttaatttagaatttttagtagggatagggttttattgtgttggttaggttggttttaaatttttgattttaggtgatttatttattttggttttttaaagtgttgggattatagaagtgagttattgagtttaattaggagtttttttgagaaagaaggaagtttaagagatttttttgatattttagtttgattttgttttttgtttgtttaaaatttttttatgttttttagtggttttttggatatagattaagttttttttttgataggtttaaattttttattatttgattttagtttatttttttgagttttttttagttgttattattttttgtttaaagtgatatgttataatatttataaagtatataagttttatgtgtatagtttaatgaattgtaaatatgtgtatatttggttgggtatagtggtttatgtttgtaattttagtattttgggaggttgaggtaggtggattatttgaggttaggagtttgagattagtttgattaatatagtgaaattttatttttattaaaaatataaaattagttgggtgtggtgttgtatgtttgtaattttagttatttgggaggttgaggtaggagaattgtttgaatttggaggtagaggttgtagtaagttgagattgtgttattgtattttattttgggtaataagagtaaaattttgttttaaaataataataataataataataataataataataataatgtgtatatttatgtaaatattatttagataaaaatatggtatatttggggtatttggggagtgttttttgtggttttttttttttatattttgttgatttattagtatagattagtttttgttattttttaaattttatattttttttttttttatataaatataaatatttgagttatgattgggtggggtggtttaagtttgtaattttagtattttgggaggttaaggtgtgaggattgtttgagtttgggagtttagagattagtttgggtaatatagagagattttatttttatataaaaagttttaaaaattaattaggggtggtgtagttttagttatttaggaggttgaggtgggaggttttagtttgggaattttagattgtagtgagttatgattgggttattgtattttagtttgggtaatatagtgagattttgttttaaaaaaaaaaaaaaaaaaaataggaaaaaataaataaatagaaaagtaggtttggtgtggtagtttatgtttgtaattttagtgttttggaaggttgagatggggttattttttgggtttataagttagagataagtttgggtgtgggttatattgttagatttaggtttttgtaaaaaataaaattatttagtttttagttatttataatgttttgtttggaagtatgttattttgggtttttgagtttttgtatttgttaattttttttgtgttggggagagtttaaattttgtttgaaatttttaaaaatggtgtttggataaatgaaggtattagagttgtgattggatggatggttgttggatggtgttattgttggtatttattgggagatgtttattggatagttatgtgatgggattaaattttttgagggagtgaggtaggtgtggttatgtgatttggtggtgttgtggggtagtggttattttgtggggtggttatgtgaaggatgtatgtttagtggggtttttatgtgatttgggtgtgttgtggttgtttgtgtggatttggtgagaggtggtggtgggagtggtggtgatggatgggtttggggagtagtttagaggtgggggtgaggtgggaggtagatgggtgggaggagggtgagtttttttgttggtttgtttgggattttttttattggtttggggttgtgtgatttttaagtattgaggggtagaaatttttggattgggtgttgttagtttttagttttttttgtttttggaggtttttggttttttgatttttgtgttttgatttttgtttttttggtgtttttggatttttgagaattaggggattttggaagttaagtttttgggtaggtttgggtttgttgtttgtattattttttgtttttggtattggtgggaggggtgggttttgtttttgtttttttaggttaggggtttggatgtatatagtgtttttttagtttttttttttggggagaatgtaggatataggtttagttttttggtttttttttattagggatttagttgtttgggtttttttgttattttatttgttagggttttagaagtttagggttttagttttgtttttttttagggttgtgagtttttatagttttttgattttttagaatttaagagtttaggtatttttttttttttttttttttttagg

SEQ ID NO: 256 - DNA, 5518 bp, Artificial Sequence
  chemically treated genomic DNA (Homo sapiens)
tttagaggagaaaggaagggaagaggtatttggatttttgggttttaggggattaggagattgtggagatttatggttttgagggaggatagagttgggattttggatttttgggattttagtagataaagtgatgggggggtttagataattgagtttttgatggagaaaggttaggaggttgggtttgtattttatattttttttggggaaagaggttaggggaatgttatatgtatttagatttttggtttgagggggtagaggtgagatttgttttttttattagtgttagaggtaggaagtggtgtgggtgataagtttgggtttgtttgggggtttggtttttgagattttttggtttttgagggtttgagagtgttagagaggtagggattgggatatggggattagagagttaggaatttttgaggatggaggggattggaggttggtagtgtttgatttgggagtttttgttttttagtgtttggagattgtatagttttaggttggtaggaaggattttggatgggttggtgagggggtttgttttttttttgtttgtttgttttttgttttatttttgtttttgggttgttttttggatttgtttattattgttgtttttgttgttgttttttgttgggtttgtgtgggtggttgtagtgtgtttgggttatgtgagagttttgttgaatgtgtgttttttatgtggttgttttgtaaaatggttgttgttttgtagtgttgttgggttatgtgattgtatttgttttgtttttttgggaggtttggttttgttatgtgattgtttaatgagtattttttgataagtgttagtagtggtgttgtttaatagttgtttgtttaattgtagttttaatgtttttatttatttaggtattatttttagaagttttgggtagggtttgagttttttttagtgtagaaggaattagtaagtgtaaaagtttagaggtttaaaatagtatgtttttaggtaggatgttatagatgattaaaaattgagtggttttgttttttgtagagatttggatttagtaatatagtttatgtttaggtttgtttttaatttgtgagtttaagagataattttgttttagttttttaaagtgttgggattataggtatgagttattgtgttaggtttgtttttttgtttgtttgtttttttttgttttttttttttttttttttgagatagggttttattgtgttgtttaggttggagtgtagtggtttaattatggtttattgtagtttggaatttttgggttgaagttttttattttagttttttgagtagttgggattatattgtttttggttaatttttaaaattttttatgtggagatgaggtttttttatgttgtttaggttggtttttgaatttttagatttaagtgatttttgtattttggttttttaaagtgttgagattataggtttgagttattttatttagttatgatttgaatgtttgtgtttgtgtaaaaagaaaaggaatatgaagtttaaaaagtggtagaaattaatttgtgttgatagattagtagggtatggaggggaggggttataagagatattttttgggtgttttaaatatgttatatttttatttgaatggtgtttatatgggtatatatattattattattattattattattattattattattattttgagatggagttttgtttttgttgtttaggatggagtgtaatggtatgattttggtttattgtaatttttgtttttgggtttaagtaatttttttgttttagttttttaagtagttggaattgtaggtatgtgatattatgtttagttaattttgtatttttagtaaagatggggttttattatgttggttaggttggttttaagtttttgattttaagtgatttatttgttttggttttttaaagtgttgggattataggtgtgagttattgtgtttggttgggtatatatatatttataatttattgagttgtatatataagatttgtgtgttttatgaatattatgatatgttattttagatagaaaataatagtaattaaggaaaatttagaaaaatgagttaggattagatgataaagggtttgggtttgttagagaagggatttgatttatgtttagaaggttgttgggaagtatggggaaattttgagtaggtaaagggtagagttagattagggtgttaggaagattttttggattttttttttttttgaaaaagtttttggttgggtttagtggtttatttttgtaattttagtattttgggaggttgagatgggtagattatttgaggttaggagtttgagattagtttggttaatatggtgaaattttatttttattaaaaattttaaattagttaggtgtggtggtaggtatttgtagttttagttatttgggagttgaggtaggggaattgtttgaatttggaggtagaggttgtagtgagttgagattgtgattttgtattttagttttagtaataagagggaaattttaatttaaaaaaaaaaaaaaaaaaaaaaaaagtttgtatagtatttaggatgtgtaatgttttttatagttgtaaatgtgtgtagtgttttaattttatgttggttttttttatttatttaaaatttttataaggttaatttgtttttaatttttttagaaattagtatgttatttgatttatagttattttttaaaatgtgttatttaataattgtatgattgaatgttggggagtatgtagaaattagatattgtttgtttttgatatttagagaagattttttagaggaggtatttttttttgattttgaaggattagtttgttttgaaaattgaagaaaggggttaggtgtgatggtttatttttatagttttagtattttgggaggttaaggtaggaggattatttgaagttaggagtttaggattagtttgggttgtattatggtgagattttgtgttaattaaaaaataaaagaaaggagggggggttgggtgtggtagtttatatttgtaatattagttgtgtgggaggttgaagtgggtgtattatttgaggttaggagtttgtgattagtttagttaatatggtgaaattttgtttttattaaaaatataaaaaaattagttgggagtggtggtgtgtgtttgtagttttagttgtttgggaggttgaggtaggagaattgtttgaatttaagaggtagaggttgtagtgagttaagattgtgttattgtattttagtttgggtaatagagtaagtttttatttaaaaaaaaataaaaagaaaaggaagtagaaaaaaaagaaaattagttggatgtggtggtgtgtgtttgtagttttagttatttgggaggttgaggtgggaagattgtttgagtttgggaggttttggttgttgtgagttgtgattaattgtattattgtaattagattgggtgatagaggaagagtttgttttaaaaagaaaaaagaaaagaaaaagttaagataaagggggagggtagagtttaggtgataattaaatgatagtttagagtaaagtaaggttaatattggattaggattgtgaagtgaaattagtgttttgaattgttggaaataagaaggtatatgtgaaatgttgtatttagaaattttttatttgaagttgtgtatttgttttggaaattaaggttgttattttgtattaagtggattagattttgttagtaagatttggatgttttatttttattgatagaatttttaataatttatgaatttagagaataaagtttttgtaagaaattatgtttttggttagtgtggtggtttatatttgaaattttattattttgggaggttaagataggtagattatttgaggttaggagtttgagattagtttggttaatatggtgaaattttgtttttattaaaaatataaaaattagttgggtgtattggtgtgtttttgtaattttagttatttgggaggttgaggttagagaattatttgaatttaggaggtagaggttgtagtgagtagagattgtgttattgtattttattttgggtgatagagtgagattttattttaaaaaaaaaaaaaatgaggtttaattggtttatggttttgtagattgtgtatagtaagtgtaatataggtttttgtttttggggaggttttaggaagtttttagttatggtagaaggtggtttttttttattttagttatagagaaggaaggaaagggtttttaatgtaggtatatatttttgaatagtatagttattgagtgagggaatatattttttagttagttgtgaagttaaaattgtttatttttatttttatttatttattttgagataggatttttttttgttgtttaggttggagtgtaatgatataattgtggtttattgttattttgattttttgggtttaagggatttttttattttagtttttggagtagttgggattatatgtgtgtgttattatgtattgttaattttgtatgttttgtagggagagggttttgttatgttgtttaggttggttttaaatttttgggtttaagtgagttatttgttttagttttttatagtgttgggattataggtatgtgttattgtgtttgattaaaatttttttttgtgtgttttgttttgttttgttttgttttgttttttgagatggagttttgttttgttgttaggttggagtgtagtggtgtgattttagtttattgtaatttttgtttttgggtttaagtgatttttttgttttagttttttgagtagttgggattataggtgtgtgataatgttttgttaattttgatatttttattagagataggtttttgttatgttggttaggatggttttgattttttgtttttatgatttgtttgttttggttttttaaagtgttgggattataggtgtgagttattgtatttagttaaattttttataataataaagatgttgaattaaaattattaagtttatatttaagatggtatttgaggagttatatttttaggtatttatgttgttgtgtggtttttgtttatatttaatagggttaaatagtgtgattaagaggatattgtggaaatgatagagtgtgattttataggataggttagaaaagttattatagtttttattttgtttttttttagattattttttttaaggaaagttagttgttatgtggtgagtgttaggtttttgagtttaagttaagttgttatattttttgtgatttgtatgtatatatttagatggttggaagtaattgaagatttataaaagaagtgaaaatagttttaattgatgatattttattatggtgatttgtttttgttttattttaattgatatgatatatttttttttttattttatttaagaaggtattttgtaatattttttttatttttgagaatgtaatttgtat

SEQ ID NO: 257 - DNA, 3628 bp, Artificial Sequence
  chemically treated genomic DNA (Homo sapiens)
tttatatggttagaaagggtttaggtggtttttggtgtttttttagtttttgtttttatggtgtatttttttgttagttgtttttttttgtattttgttgtttgtttggtttggttgtgtgtggttttttgggagtttttattttgttgtggattttagtgattattaagtttgtatgtggtttgttgtaggtttgagtagaaggttttgtgtatatttattgtgttgtggttgtgtgggaggtttgtgttgtttgtgttatttattggttgggttttgtgggtgtagtggagtgggtgggtggttggtttggatgtgttttttttggttgtggttttgtgtgttatgtgtttttggtgggatgtgttatttttgggtttgttgtggtgtttttaatttgggttagggagtggggtggagggggtggttgggtggtttagaggaggttttttttttttttttttttttgaatgaattgtgtgatgttatgtataggaaattggttgggttgtgtagagaatgaagtaagaggataggtattatagttttgtttttgtttttttttttttgtgtttgtttttttgtgttgtttgtttgtttgtttgttgtgtttttgtttgttgttttttgtggttttgttgtgttgttgttgttgttgttgttagtgaaggtgttggggttttgggttttttttgttggtggttgttagtgtttggagtgggttgtgtggtgggagttttgggaggtggttgtagttagtgttgttgtgtaggattaggaggaggagaaagggtgtgtagtttggaggtggggtgtgttggtggggtgtagtggaagagggggtttaggggggagaattttgtagtagttattttttttaggaaaagagggaaaaaataaaatttttttttattatttttttttttttattttttgttgtattatatatagtgtgggtttttagtgtttggtattggtgggttaggtgtgttttgtttttatttatttagtagttttttggaaaatgtatttgttgtttggagtttaattagaagaggatttttgtttttgtttttggtttttttattgtttttttttttttgttttttttttggggaggtgtgaagtggttttgtggatagagatttatgtttgtgtttgtgtgtgtgtgtgtgtgtgtaaattgttgagaaggggaaaatattataggatttttgtgaatattggattgaaaattgtaatttatttgttgttgttgttgtttttttttttttttgagtttttgagatttttggttgggatttttgtggattgatatttttgtgaagtagaagtttgggaattgatttggaaatttttttaatttttattttttttttttttgatttttgatttattgggaagttttaaattagttataattggagagtgttgaagattgatgggattgttgttttatgtatttgttttggttttataaaaaggaaatttgatagaggattatgttgtatttaaaaaatataagtaagttttttgtataggaaattggtttaatgtaatttttaatggaaatttttgagattttttatttaaagtgtatttgagtaaatttaatttttaggtagtttaatatattttttttagttgtgttatttgtagtgtgtatgttttgtttttatttagtgtgtatagggaaatgtatttgattttttatttattagtttgttttttttttaattttttagtattatagaggaagtagattgatattaataatatttattaataataatgtgttttatgaaataaagatttgaaaggaattggaataaaaattttttgtattttatgttaagggggaaatattagaattaagtgttttgtgtgattgaagatatttttttgtttaagaatgtaaagtatatttaataaaatagttggattataattttttttttttttttgggggttgtggggtgggagttggggtgagaggtgttgttggtttttgttgttttttttttgggaaggatggtgtatgttgggagaatagggtatgataattgggagatagtgatgaagtatatttattataagttgttgtagaggggttatgagtgggatgtgggagatgtgggtgttgtgtttttgggggttgtttttgtattgggtattttttttttttagtttgggtatatgttttatttagttgtattttgggatttggttgttaggattttgttgttgtagattttggttgtttttggtgttgttgtggggtttgtgtttagtttggtgttatttgtggtttatttgattttttgttaggttggtgatgattttttttgttgttattgttgtgattttgttgagatgtttagttagttgtatttgatgttttttattgtgtggggatgttttgttatggtggtggaggagttttttagggatggggtgaattgggggaggattgtggttttttttgagtttggtggggttatgtgtgtggagagtgttaattgggagatgttgtttttggtggataatattgttttgtggatgattgagtatttgaattggtatttgtatatttggatttaggataatggaggttgggtaggtgtatttggtgatgtgagtttgggttgaggttataggtttgagatgtgggggttggagtgtgggtgggtttttggggtaatgggaggttgtggagttggtgaaataaaattagagttgttgttttttggtgtttttatttttttttttggataaagtgtttatttttaatttgattgataatgtttgttatttaaaagtttttaatttgtttgttagttgtggagatttaaagatttagtgtttgtaatttagtaggatgtggtggtaaatggtatttttttagtgttttttaagttgaaggtttaggagtttttaggattattgttttttggtttgagtagtttgttggaattggagggaggttttagggattgtttatgaattagatattaggttgggttttgatagtttgtattttaaataagtttttttgaaataagtttgttgtatattaaaattggagaataatttgattagaagaatagattttatagaagattaagggtattattaattggtaaaattttttaaaagaggaaaattaatgtaagtttttttttttgaaaaatttagttgtgtttgtaaagagttaagttgatattttaaagtttttggattggaatttttagtgtgtgttatgtttttagtgggtgtgatgaggtgttttgaggagtattaggttatggttttgttattttgttagtgatagaatttgtattggttgtattttttgtattttataatttgtgtatggtttattagtttgttagaatgttagaattttttgttttttattatttagagtggatttaattttgtggttggttgaaaaaaatttgtatttaggtatttatgtaaagtgtagaagaattgatttttagttgtggattattttatttttattttagttgaagtgattgatatttgtggttttgaagaatatttgtgagatgattttttttttgtattgtgttagatagagtttttattattatattatataatt

SEQ ID NO: 258 - DNA, 3628 bp, Artificial Sequence
  chemically treated genomic DNA (Homo sapiens)
aattgtatggtataatgatgaaagttttatttagtatagtatgagaaaaagattattttataaatgttttttaaagttataggtattaattattttaattaaagtaagggtaagataatttatagttaagaattaatttttttatattttatatagatatttagatgtaaattttttttagttgattataaaattaggtttattttgagtggtgaaaaataaaagattttaatattttagtaaattggtaaattatatataaattatagaatataaagaatgtagttgatgtaaattttgttattgataaggtagtaaagttatagtttgatattttttaggatattttattatgtttattgggaatatggtatatattggagattttagtttaaggattttggaatgttaatttagttttttataaatataattaagttttttagggaaaaagatttatattggttttttttttttggaaaattttattgattgatgatgtttttggttttttgtggagtttatttttttaattgggttgttttttaattttagtgtataatgggtttgttttaggggagtttgtttgggatgtagattgttaagatttaatttggtatttggtttataagtagtttttgaaatttttttttggttttaataagttgtttaagttaggaaatggtggttttggggatttttggatttttagtttgagaaatattgaaggggtattatttattattatattttattggattataaatgttagatttttggatttttatgattagtaagtaagttaaagatttttagatggtaggtgttattggttaggttgggagtgaatgttttgtttagaggaggaggtagggatgttgggaagtaataattttgattttattttgttggttttatagttttttattgttttaggagtttatttgtattttaatttttgtattttggatttgtggttttagtttagatttatattattaagtgtatttatttagtttttgttattttggatttaggtgtgtaggtgttggtttaggtatttagttatttatagggtgatgttgtttattaggggtgatattttttggttgatgttttttatatatatgattttattgaatttaaagaaggttataatttttttttagtttattttgtttttgaagagtttttttattattgtggtaaagtgtttttgtgtggtgaagggtgttaggtgtagttggttggatattttggtgaagttgtggtggtagtggtgggagaagttgttgttggtttggtggagggttaggtggattataggtggtattgggttgagtgtaggttttgtggtggtgttgggggtagttggggtttgtagtggtgaggttttggtgattgggttttgggatgtggttggatggggtgtgtgtttgggttgggaggagaagatgtttggtgtgggggtggtttttgggggtgtggtgtttatattttttgtattttatttgtagtttttttgtgatagtttataatggatgtattttattattattttttggttattgtattttgtttttttagtgtgtgttattttttttagaggaaaagtaatgggggttaatggtattttttgttttagtttttattttatggtttttagagaaagaagaggagttataatttagttattttattggatgtgttttgtatttttggatgagggggtgtttttaattatgtggaatatttgattttggtgttttttttttggtatgagatgtaggaaatttttattttaattttttttggatttttattttatgaggtatgttattattagtaagtattgttaatattagtttattttttttgtgatgttgaaaggttaaagaaaaaataaattaataagtaaaaaattaggtgtgtttttttgtatatattgagtgaaagtagggtatatatattataagtaatatggttaaaaagaatgtattaagttgtttggaaattaaatttatttgaatgtattttaagtaaaaaattttaaaggtttttattgaaagttatattaaattaattttttgtgtagagaatttatttgtattttttaagtatagtatgattttttgttaagttttttttttgtaaaattaaaataaatgtataaggtaatgattttattaatttttagtattttttagttatagttgatttgaaattttttaatgaattaggagttggggggagagggagtaaaaattaggaggatttttagattgatttttagatttttgttttatagaaatgttaatttgtaggaattttaattggagattttaagagtttgagaaaaaaaaaaggtagtggtggtggtagatgaattataatttttagtttggtatttgtagaagttttgtgatgtttttttttttttggtaatttatatgtgtgtatatatgtgtgggtataggtatgaatttttatttatgggattgttttatgtttttttaggagagagataggggagaggggatgatgaaggagttggggatggaggtaggaatttttttttgattaaattttgaatagtaaatgtattttttgaaaagttgttggataaatgaaggtaggatgtgtttggtttgttggtgttgagtgttagaagtttgtgttgtgtgtggtgtggtgaggggtggggagaaggaggtggtgggggagggttttattttttttttttttttttaaaaaggatgattgttatgaagtttttttttttggatttttttttttgttgtattttattggtgtattttgtttttgggttgtgtatttttttttttttttttggttttgtgtggtggtgttggttatggttgttttttggagtttttgttgtgtagtttgttttgagtgttgatggttgttggtagggagggtttggagttttggtatttttgttggtagtggtggtggtggtagtgtggtggggttatggagagtggtgggtgggagtgtggtgggtgggtgggtaggtggtgtggaggggtgggtgtgggaggaagggggtgggagtggggttgtggtgtttgtttttttattttattttttgtatagtttgattggttttttgtgtgtaatgttatatggtttatttaaaaaaagaagaaagaaagaggttttttttgagttatttgattgttttttttgttttgttttttggtttgggttaaaggtgttgtggtaggtttgggagtggtgtgttttgttgggggtatatggtgtgtggggttgtggttggggagggtgtgtttgggttggttatttgtttgttttgttgtgtttgtggggtttggttagtgggtggtgtgggtggtataggttttttgtgtggttgtggtgtggtgggtgtgtgtggggttttttgtttaggtttgtggtaggttgtgtgtggatttggtggttgttggggtttgtgatggggtgggggtttttggggaattgtatgtggttgggttgggtggatgatggagtgtggaggggggtggttggtgggagggtgtgttatgaaaataagggttggaaaagtgttgggaattgtttggattttttttggttgtgtgag

SEQ ID NO: 259 - DNA, 4603 bp, Artificial Sequence
  chemically treated genomic DNA (Homo sapiens)
ggttagggttttattttttttggaattggggtagtgagtaatttagtttgttgtgttttggttttttttttttaagaaggttttttttttttttttttttgagagagtttttttttgttgtttaggttggagtgtaatggtatgattttggtttattgtaatttttgttttttgggtttaagtgattttttagttttagttttttagtagttgggattataggtatgtgttattaagtttggtgaattttatgtttttagttgagatgtggttttattatgatggttaggttggttttgaatttttgattttaagtaatttgtttattttagttttttaaagtgttgggattataggtgtgagttattgtgtttggttaggatttgttttttttttttttttttttttttgagaaggagttttgttttgtagtttaggttggagtgtgatggtgtgatatttgtttattgtaatttttattttttgtttttaagtgattattttgttttaattttttgagtagttaggattataggtgtgtgttattatgtttagttaattttttgtatttgtagtagagatagtgttttattattttggttaagttggttttgtgatttgtttgttttagttttttaaagtgttgggattataggtgggagttattgtatttggttttaggatttgttttttttaagtatagaagttttttgaatgatgtttaggatatggaaaggatattttaatatatttgttaattaaagtattataaattttgttttttttttttatagataaaatatttttttaagattttgtatttttttttagagtgttgtatatttgagttagtttaattatagtgtagtgattttgatttaaatttgttggtttaaattttggtttttttagttgtttattgtgtgattttgggtaaattaattaatttttttgtgttttagtttttatatgttaaagtagtagttatagtaatagtatttattttatagtgttgttgggatggtgaaatgagtaaatatttgtaaatgttttggtatatggtagttgtaatattagtgtgtagtattgtttttatgattagaaataatgtttttaaagttttatttttttgttggtttgaatgtgttgtgagaatatatattgttagttttgtttattataaatttgttgagttttttgtaggtatttttaaatgggtttgtaatttattatttttatttttttttttttttttttttttttttttttttattttttaattttttttataaagattgaaagtgaatttttattttttttttattttttaaaaattttatttgtgggttgggtatggtggttttatgtttgtaattttagtattttgggaggttaaggagggtggattataagtttaggagtttgagattagtttggttaatatggtgaaattttgtttttattaaaaatataaaaaattagttgggtgtggtggtgtatgtttgtaattttagttatttgggaggttgaggtaggagaattatttgaatataggaggtagaggttgtggtaagtggagattgttttattgtttatttgtatgtggatataagaaagggttaatatggttgataattattttatgagttttttggttttatttgaaaagtgaagtgtgtttggggaaggagttggttaggaaaatagatgtttttttttttgatttattaaggaaatggagatttaaaggaaagtttgaagtattttgtggtttttatgggtttgtttttaggaagtttttgttttatttggggaaattttaagttttatagtgagaaagttgtaaattagtttttaggagatgttgtttgttaaagttattttaattttggaaaaggggagggaaaaaggtagataagtagtgatgatattagtaggaaattagtattaggttatttagttttgaagatttagtttttatttaaataattagtaagttttgaagtttttttttaagtaaatgggagtttttttggattttggagtatatagaggattttattttttttaaaattttgtttttaggtaatttttttgagaattgtttatttttagaagattggtggagtttgatttgaaggtatgtaattaataattttttttattttagagttttatgtttgaatttttttttttgttttatggttttgtgttgtagaaatttgtaaaaatttgttagtaatggtattatttttttttagatttttttgttatgtttgggaaaataaaagttaaaaaatttggaagtttttaatatagttttttattggggtagaaatatgttagtttatagagataaagtttggtagatttattaaaattagagattagaattgttaagaaattataaggtaaatgttagatgtggtagaatagaaaggtgtttttaataaattatttatttgattttagggttagtagtagggaagattttttggattattatattaaaaatgatatttttttgttttttttaatattaaaagtaatgtgtatgtttatatatgtataaaatttgagaaatttaattggaagtttagaaggaaatttgtattatttatagttatgttattttgatataattattgtttgttatggaggttttgatttttgttgtgtttttttttttttatttatttatttatttatttatttatttatttatttatttatttgagatggagttttttttttttattttttagtatttaagttggagtgtagtggtataattttggtttattgtaatttttgttttttaggtttaagtaatttttttattttagttttttatgaagttgggattataggtatatattattaagtttagttaatttttgtattttttgtagagatggggttttattgtgttgtttaggtttgttttgaatttttggttttatagtgatttatttgttttagttttttgaagtgtttttttgattataatgaaatttagtatgtagaatattatagtttatagattagttagatggaaatattgatttatgtaatttttatttttttttgttgatttgagtaatttttgtttaaaattattttttttttttgaggtttaggaggtttttttgttgttgttttgttttgtttttgaggtagggttttgttttgttatttagggtggagtgtagtggtataattatggtttattggaatttttatttttggggtttaaatgatttttttgttttagttttttgagtagttgggattataggtgtgtattattatgtttggttaatttttgtattttttgtagagatggggttttattatgttgtttagtttggttttgaatttttggttttaagtgatttatttgttttggttttttaaagtgttgggattataggtgtaagttatgatattttatttgtttttttttttataaagtatttttttgtttttaaaaatagttaagttttgtatattgattatatattttaagtgtttatagaataaatagtattataatgaaaattttattattgtattgtttttttgattatgatgaaatttagtatagagaatagtatagtttataaattgattagatggaaatattgatttatgtaatttgtttttttttagtgaaaataagtttattagagaagtaaagaaataaaagaatggttattttatagatagagtagttgatttatgtaatttttaattttttatattgatttgagtaatttttgtttaaaattattttttttttttgaggtttaggatattttatttatttatttttttttttgaaatagggttttattttgttatttagggtgaagtgtagtggtatgattatggtttattgtaatttgtgttttttaggtttaaatgatttttttatttttggttttttgagtagttgggattataggtatgtgttattatgttttgataattttttgtatttttagtagagattaggttttgttatgttgtttaggtttgaggtttaggattatgttttttttttttgtaagataaaggtttgtttttttataggtagtagtttgaagttaagatgtaatatatatattttatggtattttgttgtttttgggttgatagattataaggataattttgttttttttagattgttttgtgtttaaaatttaaagtatagagttaagtgttatttttgttatgtgttggaaatgaatgtaagggttttaattaggttattaggtttgagaaaaattgtgttgtgtttttttattttaattttttttttttgggaatattttgatttgggagaaattaaggtgaattgaattttaatataagtattttttaagttttttaaaaagtaatttgtaagtgttggggaaaagttttttgggttgttgttttttgaagtagttttgttgtaatttttattttttagtatttttaggaaagtttaatgtttagaatggagaaggttgtggtgaggggagggtttgggaagttagggggttatatgtttttattttttaattttttgttttatttttttgttttttttagg

SEQ ID NO: 260 - DNA, 4603 bp, Artificial Sequence
  chemically treated genomic DNA (Homo sapiens)
tttgaaagggatagagaggtggggtagggagttagagagtgaggatatatggttttttgattttttaggttttttttttattataattttttttgttttgggtattagatttttttagaagtgttgaaaaataaaaattatggtgaggttattttaaaaagtaatagtttagaaaatttttttttaatatttgtaagttattttttaggaaatttggagggtgtttatattggaatttaatttattttgattttttttaaattaaaatgtttttagagagagaaagttaagatggagggatatagtataattttttttaagtttggtagtttgattggagtttttatatttatttttagtatgtggtagaaatagtatttggttttatgttttaagttttagatataaagtaatttgggggaggtagggttatttttatgatttattaatttaaagatagtaaggtattgtgaggtatgtgtgttatattttaattttagattgttatttgtaagagggtaggtttttattttatagaaagggaaggtataattttagattttaagtttgagtaatatggtgagatttggtttttattaaaaatataaaaaattattagggtatggtggtatatgtttgtggttttaattatttaggaggttgaggatggaaggattatttgagtttggggagtataggttgtagtgagttatgattatgttattgtattttattttgggtgatagagtgagattttgttttaaaaagaaaaataaataaataaaatattttagattttaggaggaaagggtggttttagataagagttgtttaaattagtgtaggaagttaaaaattatatgagttggttgttttgtttatggagtagttatttttttgtttttttatttttttaataaatttgtttttattaaaaaaaaataaattatatgagttaatgtttttatttgattagtttataaattatgttattttttatattaaattttattataattagaggagtaatgtagtgataaaatttttattgtaatattatttattttataagtatttgaggtatgtagttaatatgtagaatttggttatttttagaaataagaaaatattttataaaggaaggaataggtggggtgttatggtttatgtttataattttagtattttgggaggttaaggtgggtggattatttgaggttaggagtttaagattagattgggtaatgtggtaaaattttatttttataaaaaatataaaaattagttaggtatggtggtgtatgtttgtggttttaattatttagagggttgaagtagaaggattatttgagttttggggatggaggttttagtgagttatgattgtgttattgtattttattttgggtgatagagtaagattttgttttaaaaataaaataaaataataataaaaaaattttttagattttagaaggaaagggtgattttagataagagttgtttaaattagtgaaggaagataaaaattatatgagttaatgtttttatttgattagtttataaattatggtattttatatattaaattttattataattagagaagtattttaggagattgaggtaggtggattattgtgaggttaggaatttgggataagtttgggtaatatggtgaaattttgtttttataaaaaatataaaaattagttgggtttggtggtgtatgtttgtggttttagttttataggaagttgagatgggaggattgtttgaatttgggaggtggaagttgtagtaagttaagattgtgttattgtattttagtttgagtgttggagggtgaaagagggagattttgttttaaataaataaatagataaataaataaataaataaataaataaataaaggaaggaagatatagtaaaaattaaaatttttataataaatagtggttatattgaggtgatataattatagataatataaatttttttttgggtttttaattgaattttttaaattttatgtatatgtgagtatatatattatttttggtgttaaaagaaataaaaaaatgttatttttaatgtgataatttaggggattttttttgttattagttttgaggttaaatgagtggtttattggagatatttttttattttattgtatttagtatttgttttgtggttttttgataattttgatttttagttttagtgagtttattaaattttgtttttgtgagttaatatatttttgttttggtaaaaggttatgttggaggtttttggattttttaatttttgtttttttaggtatgataaagaaatttaagaaaaaatagtgttattgttgataagtttttgtaagtttttataatatgaagttatgaagtaaaggaaaagatttaagtatgagattttggagtaagaagggttgttaattatatatttttagattaagttttattaattttttggaagtaaatggtttttagggaaattgtttgaaaataaagttttaaagaaagtagaattttttgtgtgttttaaggtttaaagaagtttttatttgtttgggaagagattttaagatttgttggttgtttaagtgaaaattgaatttttaggattgggtagtttgatattagttttttgttgatgttattattgtttatttgtttttttttttttttttttttagggttaagataattttgataaatagtgttttttaaaggttaatttataatttttttattgtagagtttggggtttttttaggtaaagtaaaagttttttagaaatgaatttgtggaagttataaagtgttttaggtttttttttggatttttatttttttggtaagttaaaaagggaagtatttgtttttttaattaattttttttttaaatatattttattttttaaataaagttaaaaagtttatgaaatagttgttggttatgttaatttttttttatgtttatatgtaaataaataatggagtgatttttatttattgtaatttttgttttttgtgtttaagtgatttttttgttttaattttttgagtagttgggattataagtatgtgttattatgtttggttaattttttgtatttttagtagagatgaggttttattatgttggttaggttggttttgaatttttgagtttgtgatttattttttttggttttttaaagtgttgggattataggtatggagttattgtgtttggtttataaataaaatttttaaaagataaaagaaaagtggggatttatttttagtttttgtgggagaaattaagaaataaaaagaaaaagaaaggaaaaaaaaaagaaaagtggggatggtgaattataagtttatttggaggtatttgtaagagatttaataaatttgtggtaggtaaaattgatagtatgtgtttttatagtatatttaaattagtaggaaagtgagattttgaagatattatttttaattataaaaataatattgtatattaatattgtaattattatgtgttagggtatttataaatatttatttattttattattttaataatattgtaagataaatattattattatgattgttgttttaatatgtgaaaattaaggtatagaaaggttaattaatttgtttaaggttatatagtgagtggttggaagagttaagatttaaattagtaagtttggattaaagttattatattataattaagttaatttaaatgtgtagtattttggaaagaggtatagagttttagaaagatgttttatttatggggaaaaaaagtaagatttatgatgttttgattagtaaatgtattaaaatgttttttttatgttttaggtattatttagagaatttttgtgtttaagaaagataagttttggggttaggtgtagtggtttttgtttgtaattttagtattttgggaggttgaggtaggtggattatgagattagtttggttaagatggtgaaatgttgtttttattataaatataaaaaattagttgggtgtggtggtatatatttgtaattttagttgtttgggaggttgaggtaggataattgtttgaaggtaggaggtggaggttgtggtgagtggatattatgttattatattttagtttgggttatagagtaagatttttttttaaaaaaaaaaagaaaagaaaaagataagttttggttaggtatagtggtttatatttgtaattttagtattttgggaggttgaggtgggtagattgtttgaggttaggagtttaagattagtttggttattatggtgaaattatattttaattaaaaatataaaatttgttaggtttggtggtatatgtttgtaattttagttattaggaggttgaggttggagaattgtttgaatttgggaggtagaggttgtagtgagttaaaattgtgttattgtattttagtttgggtgatagagaaagatttttttaaaaaaaaaaaaaaaaaaaatttttttgggaaaggggggttggagtatagtaggttgggttatttattattttagttttagggaaggtggggttttgatt

SEQ ID NO: 261 - DNA, 2527 bp, Artificial Sequence
  chemically treated genomic DNA (Homo sapiens)
ataaaaaaagatatgaaatgaattggggaaaatatttgttatataattaagaatgaaggtttttaataaaatttgtaaaattatatatatttttaggaatgaattaataaataatttttatgaattagaaaaaagtgataatttaattaaaaaatgaataagggatataagtaatgtgttttatagaaaaaataaaaattgataatgaagttatgaaaaaatgtttagtttttttagtaattgtataaaataaattaaaataatgagatattatttttaagattagtaaatgttaaagaaaaataataattggtgagggtgtggggaagtgggtatttatatttatgtttggaaatataaattggtgtaattttatagggagagtaattttataatattttttaaagatttatatgtataattttatggtagagaaatttattttttttttaggatttttttttttttaaaaatagtgatgtggatgaaaaatatatgtttattattgtatagggtataatagttgaaaattggaaatgataatatttatattttttttagtaggggaatggttaaataaattttataagttatttggtagatattaggtatgagttaaaagttagggtttagttagagatggaaagtatattagtaatttgaaagggaaaatgtaatatgaagaattattaattagtaaaagaaggttaattgttaaaggtataagagtatttaagttgtttgtagttagtaggttttggttggtgagtaggaagttgtttgttgggaggttgttaaagttttttgaaggtgagtattattggttttataagttgttggtagttatggtgttaagagtaggaagagaagtattagaatttggaagagaaatttagttttttgttaggttttgtattgtttttttggtgttttttattgataaagttagtaaaattgtgttgttagtaaaggagatttttttatgggatgtagtttggtgttattaaagagaatagagtggatttggagtttagatgtaatataatgattgatattggtatagtatatttattttgtttttgtaaataaaatggtatatgtgatgtttttttttgtttttttgtatataaaataatatttgtttttatttattatgtatttatgtttttattttgtatgttaggagttaagtattttgtatgtattaatttattttgtttttataataatttttatatgtaggaattattatagttattttatgaatgagttgaggaaggtattgagatgttaagtaatttgtttaaggttatgtagttagtaagtggtagagtaagaattattatggttttataagtttaggaaaaagtttgaaagaattaaaatgttaatagtggggattttaaggaagtattgaagaggttatgggagaagtttttattttgttaaaaaattagttttttaaataaataaatatagtgaggtttttttagaagtagatgttattatgttttttgtatagtttgtggaattgtgagttagttaaattttttttttttataaattatttagttttaggtatttttttataatagtgttaggatgagttgatatagttttttatattgtaatttaaggtaatgttttgtataaagggatgagttagattgtttagtaattaaaatgtaaatataaattataagtatatttatttatgaattggggggttgttttgtgtgtatagataaggtatattttttaaaaaaattatttttttaagaagaaaataaattagttaataaatgataatttatagtgttaggaagtgagaaataagtgtgtgataaatggtggagaatgggagtattttttgtagtgggtgggaggagatgaggagggtgttttttggggagtggtagtggttggagtaaaggtttggaggaggtaagttatgtgttttgagtttttggtttttgttttattttgtgtttgagttggtttgaaggttggttgtttagattgagttttttgtttgtttgtattttgttaatagttttagaagaaggtgattggtggttgtttgaggaatattagtgggtaagagaattagtatttttggagtatttgttgtttgtgagattaagtattatgtatattgttttatttattttttatagtaattttattaagtagtttttttttatgtgaaaagatggaggttgggtggagtaaaaggaggtatttagagtttttagtaagtgagaggtagagttgggatttgaatttagatttgtttgatattgaagtttaggttggttttatttttttggattgttttttagggagtagaagatagatattttattttagttggttgtttttagaagtttgattttgttggtttaaaatgattttagttttttgtttagaggttgtgggttgtgggttaagatattagtagaaggagggtttagttagagaggttgatatgggtttttatttattgttatttttttttttttttagg

SEQ ID NO: 262 - DNA, 2527 bp, Artificial Sequence
  chemically treated genomic DNA (Homo sapiens)
tttggaaggaaggagagatgatggtgagtagaagtttatgttagtttttttggttgggttttttttttattgatgttttgatttgtagtttgtagtttttgggtaaggaattaaagttgttttgagttagtagggttagatttttagaagtagttagttaaggtaaaatatttgttttttattttttggaaagtagtttggagaggtggaattagtttagattttagtattaggtagatttggatttaaattttagttttgttttttatttgttgaggattttaaatatttttttttgttttatttagtttttatttttttatgtggaaaagaattgtttggtaaggttgttgtggggagtgaataaagtaatatatatagtgtttaattttatagatagtagatgttttagaaatgttaatttttttgtttattggtattttttaggtagttattagttatttttttttgaagttgttggtggggtataggtaggtaggaagtttagtttgaataattagtttttagattagtttagatataaggtgaaatagaaattaaaaatttagagtatatgatttattttttttaaatttttgttttaattattgttattttttagggaatgttttttttgtttttttttgtttattgtggagagtgtttttattttttattgtttattatatatttgttttttattttttggtattgtgagttgttgtttattaattggtttattttttttttggaaaaataatttttttaaaaaatatattttatttatgtatataaagtagttttttaatttatgaatggatatgtttgtggtttgtatttgtgttttaattattaagtaatttggtttatttttttgtgtaaagtattgttttaggttatagtgtaggaaattgtattagtttattttagtattgttataaagaaatatttaagattggataatttataaagaaaagaggtttaattggtttatagttttataggttgtataggaagtatagtgatatttgtttttggggaagttttattgtatttatttatttgaaggattgattttttaataaagtgaaaattttttttatggtttttttaatgtttttttgaggtttttgttgttaatattttgatttttttagatttttttttaggtttataaagttatagtaatttttgttttgttatttattagttgtgtgattttgggtaagttatttaatgttttagtgttttttttggtttatttataaagtagttataatgatttttgtatgtgaaggttattatgagaataaaatgagttaatatatgtaaaatatttagtttttggtatgtagagtaaagatataaatatataataagtagaaataaatattgttttatatatagagagataaagagagatattatatatattattttgtttataaaagtagggtaagtatattgtgttagtattaattattgtgttgtatttgagttttaagtttattttgttttttttggtgatattaagttatattttataaaaagattttttttgttagtggtataattttattggttttgttagtagagggtgttagagggatggtgtaaggtttagtagaggattggattttttttttgggttttggtgtttttttttttgtttttaatgttatgattgttagtagtttgtagaattagtggtgtttatttttagggaattttggtagttttttagtgggtagttttttgtttattagttggggtttgttgattgtagatagtttgagtgtttttgtatttttagtagttagtttttttttattagttaataattttttatattatatttttttttttaaattattggtgtgttttttatttttaattggattttaatttttagtttatgtttggtatttattagatggtttgtaaaatttatttaattatttttttattgaagggaatgtgagtattattgtttttagtttttagttgttatattttgtgtagtagtgaatatgtgttttttatttatattattgtttttgaaggaaaaaaaattttggaagaggaataaatttttttgttatagggttgtgtatgtaagtttttggaaaatgttgtgagattgttttttttataaggttgtattaatttatatttttaaatataggtgtaagtgtttatttttttatatttttattaattattatttttttttaatatttattaattttaggggtaatgttttattgttttagtttgttttgtgtaattattaaggagattgaatatttttttataattttattgttaatttttattttttttgtgaaatatattgtttatattttttatttattttttagttggattgttatttttttttaatttatagaaattatttgttgatttatttttaaaagtgtgtatagttttatagattttattaagggtttttatttttagttatgtagtaaatattttttttgatttattttatgtttttttttat

SEQ ID NO: 263 - DNA, 7809 bp, Artificial Sequence
  chemically treated genomic DNA (Homo sapiens)
ggataaggtataggtaagtgaaggaaattttttttgagttaatgagatagattttttgtggatataaagagtttttatatttttttgttttgtttttatttttttttttttgtatttattattatttaatatagtatgttttatttattgatatagtttattatttgatttttttattggaatgtaaattttaaaagtagggattttgttttgtttatttttatgtttttagtgtttgattataggtttaataaatatttgtagaagtgaatgaatggggttgaggttttggtgtttaagagattatattttaaggtggatttttaagagtgtggtttatagagttaggtttgggttttaattttgtttgttttggttatttagtatttaagtgattttaaatatttgtttttttgaattttagggtttatatttgtaaaattggtggggggtgggaatatttttttggtaggattgtagttaaggataagtgaaataagtatgaaaagtggttagtatgatgtttgggatttagtaaatgtttagtaaatagaaatgattatttttgaaatgtgaaaatgaattgtttagaatgatgggagtttataggattagatttttgttgtttttttttttttttgtgtgggaggtgttagggtgggagggagggaagagggaatggaagattgtgtaaggtgggtttggttggattagatatttgagtttggaatagttaattgtgatttgggtataagggtggtgaggggagtttatggttttatttggggtggaggagggggttaaggggaagttatgttttggaggaggttgaatgggtgggatagattatggttttatttatggttttttttttgttggaagtgtgatgattttttttggatttttgtaaaagtggggttatagtgaattttggtgaagggtttgtggtggattaggaattggtgttagaattgtaaaagggtatttgtgtttggagtggggaggtgatgtgggggtggggtggggttttgggggtggggtgagttgtggaggtgttgttttggggtggggtggtgatagaaggatggattttgggggtgaggattgattttgggggtggggtgagagtgtgaattggagtttgaggttgagtggtgatgtaaggatgattttgagggtggagtgaggggaggggattggtttttggaggtggggtggtggtatgaggttagtttttgggggtggggtggtggtgtaagattgattttgggggtggggtgggggtgtgggttgaattttgggggtggggtggtggtgtggaatggattttggggttggtgtgaggtgttgaggtgtgttttgagggtggggtgatgatgtagagtgaattttgggggtggggtgagattttttagatgtgttttggggagtgggtggtgatgtggtggtaggttttggggataggtggtgattttagaattgattttggggatagggtgaggtgtggaggtgttttgaaggtgaggtggtgatgtaagagtgaatttttggggtggggtgaggtgttggagatgtgttttgtgggtgggatggtaatgtgggggtggggtggtgatgtgaggttagtgtggggatatggggtgggttttggggtggggatgtagtggtggattttggagtggggtggtgatgtggggtgggttttggggtggggtggtgatgtggagtgtgttttggggtggtgtggtgatgggaggtttggttttgggggtggggtgaggtgtagaggtgtgttttgagggtggggtggtgatgtaagagtgatttttgggggtggggtgaggttttggagatgtgtttggaggtggtggggagtgaagattgatttggggttgtgatgtgggggtaggttttggggtgggggtgggttttggggattggggtgggtggttgaggtttggaagtggattgaggtggtttggagttttagttggttatttgttatggatgaagtggattggtggtttttgtggtggtgttggttgtggttggtggaagagttgtaggtggattagttttgggatgttttgttgagttgtgagttgtttaggttttatatgattgaggatatttaggtgtgtttttggttttttgtttttgtgttgtatggttgggtttttatgttttttgaggaggtgttgtgtgggagtttagttttttttgtggttttaaattttttagtggagttaaagaattttaaatattttttagttgggtgtttgttaaagtgattttatgttatatttagttagtgtatattgttagtgtttgtgttttttgtgtaaaggaaaaatgtgagatatattttgagaattttgaataagaaataatttatgaattggagaatattagattgaaagagttttagtgttgtaatgataaaatgttagaggtaagtatttattgggaaaatgtggaagtaaaataaagaaattatttgattggtttgtagttataaaattgttttttttttttaaggtttgttaattgattgtttttggttggttttaagttttatttttttttaatataagtatttattagatatgatttaagttaaattttgtttatgtttgtagtttaagtaagatttaggttatttaggatatttgattggttttgtttgtttaggaattttttatggttggtttttattttaatttatgttaatatttgtgaggaaggaggtgtgtgtgtttttatttttttagtatagaggttttgggaatttattttggtattaggttgtttggtagtgtgtttttgggttagttatttattttttttgagttatagtttttgggttgtgaaatgggaataagaataatattgttataaggattaaatgaaataatggatgtgaaattgtagtgttaggtatagagtgggggattagtgtattttgttttttttggttagttttttttgtgtttagtttatgttttgttaagaggttttggaaatgaggggatttgatgtagaatggagaataatgaagttaaatatttgaggttttgtttaaaagtatttttttatttttgttttatttgatttttattataggtttgtgaggatgtaggagatattttttattatgaggtgtagtaggtgtgagtggttggttggatatttttggttagtgttttggtttagggaaagagtttttaaataattgagtattatatgagtaattatttattaataataaaataagttttgtgttttttgtgtggtttttattggggaatagtaatggtttgaggttatagtttttgtttttaggaatgtttatggggattataaatttaaatgtttatggaggattaatggatgggtgttatagtggatagtttttgtattgttttttgtttttagttgagtatggttatattaataaatggtttagtattgttatattttatatttattttgaggtagggttttatttttgtttagtttggagtgtagggatgagattatggtttattgtgattttgattttttgggtttaagtggtttttttgttttagtttttagagtagttgggattttaggtatatgttattatgtttggttaattaaaaaaaattttttttttgtatagataggagttttgttatgttgtttagatgagttttaaatttttggttttaagtgatttttttgttttagtgttgggattataggtgtgagttattgtatttggtttagtttttatattttaaaaaagaagttgaaaattttgatttttttgttaaattttttggtttaaaatgttagtaataaatttagaaattttttaagaattttgtgggaattataggttgttattttgttatttagtatggttgaaaaataggtaggttttggaattagttggatttgggtttttattttggttttgttatatattagtaagttgtaaaaaattataattaatgagttaaataaatagaaaaattttatgatttagtttttttgaaattttttattttaaaaagttgggaagttttaatttaattttataaagttattgagggagaaaaagatgaaataatgtatttaatatagtgttgattttttggagtgtttagtaaatgtggagagaaatttaaatattattatttatttgtatgtagttaattgttttgttagtgagatttatttttttagtggtattgtaggtttgtgttgtttttaatagtagttattagttatatgttgttaaaggtaaatttgaagtaattaaaattaaataaaattaaaaattggtagggttaagttttatagggtttgtgggtttttttttttgtgtgtggagatgagagattgtagaaataaagatataggagaaagagatagaaaaaaagatagttgggtttgggggattattattatttagatgtggagatagggtagtggttttgaatgtttggttgtgttgttattggatataaggtaaggggatagggtaaggagggtgaattttttaagtgattgataaggtgaagtaagttatgtgattataggatagggggttttttttttttaggtagttgaagtagagagagaaggtagtatatgttagtgtttttttttatgtatttataagaaagattaaagattttaagatttttattattttttttattgttatttatgaattttaaataggaattaggagtatgggaggaatatgaaagtgggtaaggagtgtgattatggaagtatagtattatagggaggggtttaggtttttggatgattgtgggtaggtatggataatatttagttttttataagaagttggtggagtagagtgttttttgatgtttttaaggaaaggagatttttttttttttttttttttttttgaggtggtgttttatttttttgtttaggttggagtgtaatggtatgattttagtttattgtaatttttattttttgggtttaagttattttttttttttttttttttttttttgagatggagttttgttttgttgtttaggttggagtgtagtgttgtaattttggtttattgtaagttttgttttttgggtttatgttattttttttttttagttttttgagtagttgggtttataggtatttgttattatgtttggttaattttttgtatttttagtagagatggggttttattgtgttagttaggatggttttgattttttgattttgtgatttgtttattttggttttttaaagtgttgggattataggtttgagttattgtgtttagttagggtttaagttgttttgttttagttttttgagtagttggaattataggtgtgtattattatgtttagttaatttttttgtatttttagtagagatgggttttattgtgttggttaggttggttttgaatttttaattttgtgatttgtttgttttggttttttaaagtgttgggattataggtgtgagttattgtgtttggtaggagatttttttttgtggtttgttaagtaatgggtgtttttttagatattggtattattgtttgattaaggagtttttaagtggtttttatgtgggtttgatagagggtttattttttgttttttaggttattttttataatgtttttttagtatttgattttatatttgttggttatttttaagttatattagtaatgtaataaagagtaatattaaaagttaatgattaataatgtttataataatgattgataattgtttatgattatttttatatttaatttgtattatgattatttttattttaattattttttttattatattgaaatagtttgtggttttagttttttgttttggtatttgggtaattttttgtttataaaaatttagttttttagttgtattatttaagtgtttaatggttatgtgatatatggttattaaataggataatatagattaagaatatttttattattatggaaggtttttatagatagtgttgttgtaggatagttgaggatatggtgttattttatttttgtggattttgagaatttgtttagtgttgggtatttgaggataggtggtagataattagattttttttttttagtgattgattttattattttgatattttttaatttttttttttgagatagggttttgttttgttatttaggttgaagtgtagtggtgttattatagtttattgtagttttattttttgggtttgagttatttttttgggagttttagttttttgagtagttgggattataggtgtgtgatattatatttggttttttttttgttattttttgtagagatagggttttattgtgttgtttaggttggttttgaattgggtttaagttatttttttattttagttttttaaagtgttggaattgtaagtatgagttattgtgtttggtttgtttgttaattttgatttttgttttgtttttatagtttttttagttagtgtttatgttttatggattttttttttttgtatttttgttttgtttttttatttttttttattttagttgtattatttttgttgttttttgatttggttatggtttatttttttttattttttattttgatttttggatgattttttgaaaggttatatttgtttttgttattttatttttaaaattttttggtggttgggtatggtagtttatgtttgtaattttagtattttgagaggttgaggttggtggattgtttgaggttaggagttttgagattagtttggttaatatggtgaaattttgttttaattaaaaaatataaatattagttaggtatggtggtgggtgtttgtagttttagttatttgggaggttgatgtgggagaattatttgtatttaaaaggtggaggttgtagtgagttgagatggtgttattgtattttagtttgggtgatagagtaagattttttaaaaaataaataaaaaaataattgatggttggttatggtggtttatgtttataattttagtattttgggaggttaaggttggaggattatttgaggttagtttaagattagtttgggtaatatggtgaaattttgtttttattaaaaataaaaaaaaaattagttaggtatggtggtgtgtgtttgtaattttaattattttggaggttgaggtaggataattgtttgaattttggagttggaggttgtagtgagttgagattgtattagtatattttagtttgggtgatagagtgagattttgttttaagaaaaaaaaaaaaaaataaaaataaaattaaaaaattttttggtggtatttgataggttttaggatgaattttttggtttggttatataaaggttttgttttttgttattatttattttttattttataagattttgaatttgttatttattttatgatatttttagttttatgtgtttttttttgggtatttgttttttgttgtgttattgttgatttgtttgattgtattttttattagaaatttgttttttaaggattgagattgtttatggtagtatttttagtatttagtatagtgttgggtattttttgttttgtaaaataatgaatagattagtaaaggttggtaaatggtatatagtgtatttgtagttttattgttgtttatgtgtttgattgtttagatttatagtagttgggaaatggggagataaggtgagagttatataaaagtatgtggataattagtattttgtttttttttttaaatagt

SEQ ID NO: 264 - DNA, 7809 bp, Artificial Sequence
  chemically treated genomic DNA (Homo sapiens)
gttgtttggaaagaaaggtaggatattaattatttatgtatttttatatggtttttattttgtttttttattttttagttattgtaagtttaaataattaggtatgtgggtagtaatggagttgtaggtgtattgtgtgttatttattagtttttgttgatttgtttattattttgtagggtaaaagatgtttagtattatgttaagtgttgaaaatgttgttatggatagttttagtttttaaggagtaaatttttaatggggaatgtaattagataaattagtaatgatataataagagataagtgtttagagggaagtatatggggttgaggatattatgaagtgaatagtgaatttagagttttatgaggtgggaggtagatagtggtaagggataaggtttttgtgtggttaggttaagaaatttattttgagatttgttaggtgttattaaagagttttttggttttgtttttgttttttttttttttttttgagatggagttttattttgttatttaggttagagtgtattggtgtaattttagtttattgtaatttttaattttaaggtttaagtgattattttgttttagtttttggagtagttggggttataggtatatattattatatttgattaattttttttttatttttagtagaaatagggttttattatgttgtttaggttggttttgaattgattttaagtgattttttagttttggttttttaaagtgttgggattataggtatgagttattgtggttagttattggttgtttttttgtttgttttttgaggagttttgttttgttatttaggttggaatgtagtggtattattttagtttattgtaatttttattttttgggtataaatgatttttttatattagttttttaggtagttgggattataggtatttattattatgtttggttaatgtttgtattttttggttaagatagggttttattatgttggttaggttggttttaaaatttttgattttaagtgatttattaattttagttttttaaagtgttaggattataggtgtgagttattatgtttggttattaaagagttttaagaatggagtgatagagatagatatggttttttaaaaagttatttaggggttagggtgaaaaatggaaaggagtgagttatagttagattaggaggtagtaaagatggtgtagttagaatagagagaagtgaaaggataaagtagagatataaagagagagggtttataggatatgggtattgattggggggattgtgaagatagagtaagggttaaggttgataggtaggttaggtatagtggtttatgtttgtaattttagtattttgggaggttgaagtgggaggatagtttgagtttagtttgagattagtttggataatatagtgagattttgtttttataaaaaataataaaaaaaaagttaggtatggtgttatgtatttgtagttttagttatttaggaggttgaggtttttaagaggatggtttgagtttaggagataaggttgtagtgagttgtgatagtattattgtattttagtttgggtgatagagtaagattttgttttaaaaaaaaaaattgagaggtgttaggatggtggggttagttattaagaaggaagagtttggttatttgttatttgtttttagatatttagtattggataggtttttaggatttatagggataagatggtattgtgtttttaattattttatagtagtattgtttatgagaattttttgtgatgatggaaatatttttggtttgtattgttttatttagtaattatatattatatgattattaagtatttgggtagtataattgaggaattgaatttttgtgggtgaaagattatttaggtgttgaggtaagagattgaagttataaattgttttagtataataaagaaaatagttagaataagaatagttataatataaattaggtatagagatgattatggataattattaattattattataaatattattaattattagtttttaatattattttttgttgtattgttaatataatttaggaataattggtgggtatagggttaggtgttgaagggatattgtgagaagtgatttagaaggtaagaggtgagttttttgttaggtttgtataagggttgtttgagggttttttggttaagtggtaatgttagtgtttggggagatatttattatttagtagattgtgaaggggagttttttgttaggtgtggtggtttatgtttgtaattttagtattttgggaggttaaggtaggtagattataaggttaggagtttaagattagtttgattaatatggtgaaatttgtttttattaaaaatataaaaaaattagttgggtgtggtagtgtgtatttgtaattttagttatttaggaggttgaggtagaatagtttgaattttggttgggtgtggtggtttaagtttgtaattttagtattttgggaggttaaggtgggtagattatgaggttaggagattgagattattttggttaatatggtgaaattttatttttattaaaaatataaaaaattagttgggtgtggtggtgggtgtttgtagatttagttatttgggaggttgagggaggagaatggtatgaatttgggaggtggagtttgtagtgagttgagattgtggtattgtattttagtttgggtgatagagtgagattttgttttaaaaaaaaaaaaaaaaaaaaggaaaatagtttgaatttggaaggtggaggttgtagtgagttgagattgtattattgtattttagtttgggtgaaaaagtgggatattattttaaaaaaaaaaaaaaaagaaagggagttttttttttttggaggtgttagggagtattttgttttattagttttttgtgggaggttggatattatttatgtttgtttgtagttatttggagatttaaatttttttttgtggtgttgtgtttttatggttatgttttttgtttatttttatgttttttttgtatttttggtttttgtttgaagtttatagatagtggtagaagaaatagtgaaagttttaaagtttttgattttttttataagtgtatagaagaaaatgttgatatatgttgttttttttttttgttttagttatttaaaagggaagggttttttgttttatgattatgtgatttgttttattttattaattatttagaagatttattttttttattttgtttttttgttttatatttaataatagtgtagttaggtatttggggttattattttgtttttatgtttaggtggtagtggttttttgggtttagttgtttttttttttattttttttttttgtgtttttatttttatgattttttatttttgtatatgaggagaaaaatttataggttttgtaaggtttgattttattaatttttagttttatttaattttaattattttaaatttatttttaatgatatgtggttaatggttattgttgggaatagtatagatttatagtgttattgagaaggtaagttttattagtagaatagttggttatatgtaaatagatggtggtgtttaggtttttttttatatttgttgaatattttaggaggttaatattgtgttaaatgtattgttttattttttttttttttaataattttatagagttaaattagaattttttaattttttagggtaaaaaattttagggaaattgagttatagggtttttttgtttgtttggtttattggttgtggttttttataatttgttaatatgtaataaggttaggatgagagtttagatttaattggttttaaaatttgtttgttttttagttatattgaatggtaaaatggtaatttgtggtttttataaggtttttaaaaaatttttgaatttgttgttaatattttaagttagggaatttgatagaggaattaagatttttagttttttttttaagatgtgaaagttgggttgggtatagtggtttatatttgtaattttaatattgaggtaggagaattatttgaggttaagagtttgagatttatttaggtaatatagtaagatttttatttgtataaaaaaaaaattttttttaattagttaggtatggtggtatgtgtttaaagttttagttgttttaaaggttgaggtaggaagattatttaagtttaggaggttaaggttgtagtgagttatgattttatttttgtattttaggttgggtaagagtgagattttgttttaaaataagtgtaagatgtggtaatattgggttatttgttgatatggttatatttagttggagatggagggtagtgtaaaggttatttattatgatgtttatttattggttttttatgggtatttgagtttgtgatttttgtgaatatttttgaaggtaaggattgtggttttaaattattattgttttttagtaggggttatatagaaggtataaaatttattttattattaatgaataattatttatatgatatttaattatttaaagattttttttttgggttagggtattggttagggatatttagttagttatttatatttattgtattttatggtaggaaatattttttgtatttttataggtttgtgatgagggttaaatgagataaagatgggaaagtgtttttaaataaaattttaaatgtttgattttattattttttattttgtattaggtttttttatttttaaaattttttaataaaatataaattgaatatagaaggggttggttaaagagggtagggtatgttgattttttgttttgtgtttagtattatagttttatatttgttattttatttagtttttatgatagtattatttttatttttattttatagtttagaaattgtggtttaaagagggtaagtgattggtttaagaatatgttgttaggtagtttgatgttaaagtgggtttttgaaatttttatgttagaaaagtaaaaatgtatatgtttttttttttgtaagtattaatgtaaattaaaatggagattaattatgaagaatttttgagtagataaaattaattaggtattttaagtgatttaaattttgtttaaattgtaaatataagtaaaatttaatttgggttatatttgataaatgtttatgttagagagaaataaaatttaagattagttaaaagtagttaattaatagattttaaaaaaaaaaggtaattttgtaattgtaaattaattaaataatttttttattttgtttttatatttttttaataaatatttgtttttgatgttttgttattgtaatattaaagtttttttagtttgatgttttttaatttatgaattgttttttatttaaagtttttaagatgtgttttatattttttttttatataagaaatataagtattaatagtgtatgttgattgagtatggtatggaattgttttagtgaatatttgattaagaggtgtttgggattttttggttttgttgaggggtttgaagttatagggaaggttaggtttttgtataatgtttttttgaggggtgtggggatttggttgtgtagtgtggggatagggggttgggggtgtatttggatgtttttgattatatggggtttgaatagtttgtggtttagtagggtgttttagagttggtttatttgtagtttttttattagttgtagttggtattgttgtaggagttgttgatttgttttgtttatggtgagtagttaattaagattttaggttgttttagtttgtttttgggttttggttgtttgttttagtttttaggatttgtttttgttttagggtttgtttttgtgttatggttttgggttagtttttgttttttattgtttttggatgtatttttaaggttttgttttgtttttaggagttgtttttgtgttattgttttgtttttaggatgtatttttgtgttttgttttgtttttagggttaagttttttattattgtgttgttttagaatatgttttgtgttattgttttgttttagaatttgttttatgttattgttttgttttagaatttattattgtgtttttgttttagaatttgttttgtatttttgtattgattttatgttattgttttgtttttgtgttattgttttgtttgtaggatgtatttttaatgttttgttttgttttaaggatttgtttttgtgttattgttttgtttttaggatgtttttgtgttttgttttgtttttagggttaattttggggttattgtttgtttttagaatttgttattgtgttattgtttattttttgggatgtatttagaaggttttgttttgtttttaggatttgttttgtgttattgttttgtttttaggatgtattttagtgttttgtgttgattttagaatttattttgtgttattgttttgtttttaggatttaatttatgtttttattttgtttttaaggttaattttgtgttattgttttgtttttaagggttagttttgtgttattgttttgtttttaagagttaattttttttttttgttttatttttagaattgtttttgtgttattgtttagttttagattttagtttgtatttttgttttgtttttaaagttaatttttatttttaggatttatttttttgttattgttttgttttaaggtggtatttttgtgatttgttttgtttttagggttttgttttgtttttgtattatttttttattttgggtgtaggtgtttttttgtaattttggtattagtttttggtttattgtgggttttttgttagaatttattatagttttgtttttatagagatttggagggagttgttatatttttagtaagagggaaattatgagtggagttgtgatttgttttgtttatttaattttttttggggtatggtttttttttagtttttttttttattttaagtaaaattataagttttttttattgtttttgtgtttagattgtagttgattgttttaaatttgagtgtttgatttaattaagtttattttatatagttttttattttttttttttttttttttattttaatattttttatatagaaaaaaaaaaaaatggtagaaatttagttttgtaaatttttattgttttgaatggtttatttttatattttaaaaataattgtttttgtttattgagtatttgttaagttttaggtattgtgttagttattttttatgtttattttatttatttttaattataattttgttaggaaagtatttttattttttgttggttttatagatgtagattttagggtttagggaaatgaatgtttaaggttatttgggtattaagtggttgaggtaggtaggattgaaatttgaatttgattttgtaagttatatttttaagaatttattttagaatataattttttgagtattaaaattttagttttatttgtttatttttatgaatatttattgagtttgtagttaaatattaagaatatgaaggtgaataaaataaaatttttgtttttagagtttatattttagtggaaggattaggtgataaattatattaataaataagatatattatgttagatagtgataaatgtaaagagaaaaaaataaaaataagatagggagatatgaaagttttttatatttgtaagggatttattttattggtttaaagaaagttttttttatttatttgtgttttattt

SEQ ID NO: 265 - DNA, 1630 bp, Artificial Sequence
  chemically treated genomic DNA (Homo sapiens)
gagtttgagttatgttatgtttgttgtatgtgttagtttgtgtagtatattagggtgttggtttttttttttttttttggagtgaaatatattaaagggtgtggtgggggtggggggtgatgggaggaaggaggtgaagaaatgttattagattgtattttttgtaaagatagttttgatttaaggatgtgttagagtatgtgttagggttgattgtgttggtggattttattgtagttggtttttagggagaaagtttggtagagtgaggtgtgaaattggagggttggtgaggatgtgggtgaaggattgagtgtggaggttttatgtttttggggaaaggaaggggtggtggtgtttgtgtagggggagtgagggggagttggatttaattttttatttgtttttttttttttttgggttattttttagaaagttgtattggtgtggttatgtttagtgtagatattttgggtggtttgttagtagatgtaggggtgaggaagtgggttttttttgtgtggttgttgggtgggggaattgttgggagttttgtttttggtttgtggtggttttagatgttgtattgtgttgttttatgggttttgaagagtttttagaaatatgatggtttttgtttgaggattatattttatttttttagagaagtatttttttttttttttaatatttattttttttttttttttttttttttgtatatattttgtaggggggggtagaagggatgttgttttggtttttttaattggggtttttgaaatagttttgaagttattaggaatatagattttagggatatgatttttatttttgggtatgtgaggttgttattttttaaaattatttttttttttattttttatttaagggatttatttttaaattgtttgaggttattttatttttagataatttattttatatttttggattttaaatataagggtaggaggattaggatttgttttgaagaagttaaagttggagggttgtattttggtgtgttatatttatagaatgagtgaaattagagggtagaaataggagttggtagttttttgtgggttgtttgtttggggtttttggtatgtaggttggatggagggagaggggtggggggtggtgggggattgtgtttgaagttgggttgggttagttgttgttttttttaataatgagaggggaaaaggagggagggagggagagattgaaaggaggaggggaggattgggaggggaggaaaggggaggaggaattagagtggggaggtgtggggagagggaggagagttaattgtttagttagtttgtgttattgttttagagtggagaagagtgagtaggggagagtgagattagttttaaggggaggattggtgtgagtgaggtagttttgaggttttgtttgtttattatttaatttttgttttttttttgttttattttttttttttgtttttattttttttttgaaaattttttatttagttaaaggaaggaggttaggggaatgtttttttttttttttttaaaaaataaaaatagaaaaatttttttttaggttggggaaagtaggagggagaggggttgttgggttggttatggag

SEQ ID NO: 266 - DNA, 1630 bp, Artificial Sequence
  chemically treated genomic DNA (Homo sapiens)
ttttatggttagtttggtggttttttttttttttgttttttttggtttggaaaagggtttttttgtttttgttttttggaaggggaggggagagtgtttttttgattttttttttttggttaaatagggggtttttgggggagaggtgagggtagagagagaaggtggagtagaagggaggtgaggattgggtggtgggtgagtagagttttggggttgttttatttgtattggttttttttttaaaattggttttgtttttttttgtttgtttttttttgttttgaagtggtgatgtaagttggttgggtagttagtttttttttttttttttgtgtttttttgttttggttttttttttttttttttttttttttggttttttttttttttttttaatttttttttttttttttttttttttttttttgttattaaggagaatagtagttggtttgatttaattttaaatgtggttttttgttattttttatttttttttttttatttagtttgtatgttaggggttttggataggtaatttataaaaaattattgatttttatttttgttttttaattttatttattttgtaggtgtagtatgttaaaatatgattttttaattttggtttttttaaaatggattttaatttttttgtttttgtatttaagatttaggaatgtagggtagattatttgaagatggggtgattttagataatttagaaataggttttttaagtgaaaaataagggagggggtgattttagaaaatagtaattttgtatatttagagataaaggttatgtttttgaagtttgtgtttttgataattttgaagttgttttgaaagttttgattaaagggattagaataatgttttttttgtttttttttgtagagtgtgtgtagaggaagaagagggagggagaggtgggtattaggaaggaaggggggtgtttttttggagggatagaatgtgatttttgagtagaaattattgtgtttttgggggttttttggggtttgtggggtgatgtggtgtagtgtttagggttgttgtaggttgggggtagggtttttagtggtttttttgtttagtggttatgtaggaaaaatttgtttttttgtttttgtatttgttgataagttgtttgaggtgtttgtgttgagtgtggttatattgatgtagttttttaggaaatggtttgggagggggagggggtgagtgagggattaggtttggtttttttttgttttttttgtgtaaatattattatttttttttttttttggaggtatgaggtttttatgtttggttttttgtttgtatttttgttgattttttggttttgtgttttattttgttaggttttttttttgggagttgattgtggtgaagtttgttagtatggttggttttgatatgtgttttaatgtatttttgagttaaggttgtttttataggagatatgatttggtggtgtttttttatttttttttttttgttattttttatttttattgtgttttttggtgtattttattttaggaggaaggggagagattagtgttttgatgtgttgtgtaagttggtatgtgtagtgggtatggtgtggtttgagttt

SEQ ID NO: 267 - DNA, 3664 bp, Artificial Sequence
  chemically treated genomic DNA (Homo sapiens)
gaatttttaattattattttgtttttttatttttaatatttttagtggtaattgtattttatttatttttgtgtttatgaagtatagtgttgtattttggagatattatatagaagttggtttaaagggtaataaattgtatttgttaagatgatagtatggatttataataatttttgaaattttataaagaaagatgattgagttaaattgatatatttagtattatagttgtggaagtttgtggttttttttatgttaaaggtaaaatggatataatgaattagttgttatttttagatgatatagaagttgaattttttttaagttttttaaagagaaagatatattaaaatttattaaaattagtattataaattgtatagaatagtttggttttttagagtatttttttggggtagtgagtttttatttaaaaaatgaagtttggattttaaatataagttttaaaagtgattaggttttagtaggagtttttaaatttttatttatattatgatttttaaatgttttgtttttgttgtttaggaataaaaattgttaaggttgagttagatgtaatgtataatattagatgatagatgtagtttattgtgttaaaaggtgttaaatatttaagtgtatgtgatatattttatattataagggtaaggaagttttattttatattttgatttgggttttttaatatatatttgtagtggatgtggtaattagtttttgttttatgttttattaggattaatgtaattagaaatttttaaaatggatttttattatgtttagttttgttttattgttttatttgtttattttaaaaagattttagaatggtgtttaggttgggttggtggtttatgtttgtaattttagtattttgggaggttaaggtaggaggattgttggagtttaggagttggagattagttagggtaatataaggagatattgtttttgtaaataaatagaaaaaaaaaaagtaagaaagaaagagagaaagaaggaaagaataagaaaaaggaaaaaaaaattaattgtagtaagtgtagaaattttttttaaggatatgatggatggtaatgaagatagagtttttgatattggattatttaaagtataatttaagtttttttttttttttttatagaattgtgaatttttgtgttttaattatatttaagttaggtgtggtggtgagtgtttgtagttgtagttgtgttggaggttgaggttgattgtttgagtttaggatttggaggttagtatgtgtaatataatgagatttagtttttaaatgtatgtttttttttatatatttaaaattttgatgtgaaaatattttaaaatttaatatattttaaatgtttttaattgtataataaataaaatgtaaataataaaataatttaatattaaatttaaaaatgaggtagaaataaagtatagtgatataaataataaatttttttttatatttttgaggtggttttttgagttttttattttttttttaaggttattgaaatgtgttttttggagttagtttgtaaattatgtatttagaaaaatataattatatatttttaattttaagtattagaagtgaaagtaatggaattttgatgtaaatataatattatttttttgatgagttattttgagtataataaatttgaattgtgttaatgttgggagaaaaaatttaaaagaagaatggagtgaatagtagttttttgttttgttgattagaaatagtaggatgatatttttttgattggaggagagtgtttgtgtttgtatttagttggtgtttgtttttttgttttttttttagttgttttttttttttttttttgtgttttagttatttgggaaggtttgtttagtgtagttgggttttgattggttgttttgaaagtttatgggttatttgattggtgaatttggggttttttagtgtggtgagtttgaaattgtttgtatttggttttaaagttggtttttggaaattgagtggagagtgatgtggttgttgtagttgttgttgtggttgttgtggaataataagttgggtatagtggttggggttagggttgtgtttaggggatggttgagggttttggagggtgagtattgaggaatggggttttttaagaaggttggattggaggttagggatttgtgtggggtttggttgggttttggggggtggtgggtagggtttttgtttgggtttggttgtgtgagttatattgggttggttttagagggaggttatgggagtttagtttggtggggttaggtggtgtgggggtgggggtttggggttgtagttatgagttgaggttggttgtttttaggaattgtttgaagaggtttttgggttttgattgaagtaaaatttgtttttttatgttgagtgtttgtggagtagtaggtttttttttgggtttggtttttgtgtgttttgttattttgttttgggggtgggaaagtgggattgtatttgggttaggtataggtgtgggtttttagagttaggttgttttgagaaattgattttggaatttgtgggtttttttgggtttgttttgtttatggttttggtttatttggagttgttaagaatagttagtttaggtatttaatttttatgagtagtgtagtgtagttttttttatttaaaaagatatatttttgtttttttttggattgatttttttttgaagatgaatgtgagaaatagaatttaaaggtttattttgagtgtgttttataaatgattttattattagtgatgggtgttagaaaaatttaggtaattatgtttggagttttgatgttttattggtaaattttagaggaagttttgaatttttggttgttagtttttttttttaatttatttattgtgatttaagtatattgtttttttgtttagtttttgatattgtttaggttataattagaattttatttgtggaattgtattttttatttttttgttttatggtgtttaagtgatattttttatttttggaaaaagtattttgaaagttttgagtatgtttgtttgtgattttagtaagtagaggaaaaagattaaaattgttatgtgggtaattgtaaatatttaaaatgtttttgttgttttaaataaaatttttttaatgaatagtttgaatatattttagttttgtttttataattttaaaaaataatgttttgaataaaattaggagtattataaagtggtataaatttgttgaaatatttgggtataattttggtatatgtaggtattattttaaagtgttataaaaagggaatataattttggtttttgtttggaaagaatagataagttgatatttgaatttgagggttattttgattggaagaagttaaatattatattagtatagaatatatatgtttttaatgttttaggagttaagaaggatggaaagttattgtaggagtttttatttttgtaaatattgtttgaatgtaattaatatttatggaatatttatgttgtagtaggtattgtggaaaatgttttatatatagtgttttattaatgtttaaaattatttgagttagtggtatgtaattaagttagttttttttttattttagg

SEQ ID NO: 268 - DNA, 3664 bp, Artificial Sequence
  chemically treated genomic DNA (Homo sapiens)
tttaaagtgaaggaaaaattgatttaattatatgttattaatttgagtagttttaagtattaatgaaatattatatgtaaagtattttttatagtgtttattgtagtataagtattttataaatattaattatatttaaataatatttataagggtaaggatttttataataattttttattttttttgatttttgagatattggaaatgtgtatattttatattagtgtagtatttagttttttttaattaaaataatttttaaatttaggtattaatttgtttattttttttaaataaaaattagaattatgttttttttttgtgatattttaaagtagtatttgtgtgtgttaaagttatatttaaatattttaataaatttatattgttttatgatatttttaattttatttaaaatattattttttaaagttatgaggatagaattaaaatgtgtttagattgtttattaggaaaattttgtttaaaatgataaaaatattttaagtgtttatagttgtttatgtgataattttaattttttttttttgtttgttgaggttatagataaatatgtttaagatttttaaggtattttttttaagagtaggaaatattatttaagtattgtaaaataaaagaatgaaaagtgtaattttatagataaaattttaattataatttaaataatgttaaggattaagtagaaaaatggtatatttgaattataatgaatgggttaaaaaaaaaagttgataattagaagtttaagattttttttgaagtttgttaatgaaatgttagaattttaggtataattatttagatttttttaatatttattattgatgataaaattatttataaagtatatttagaatagatttttaagttttattttttatatttatttttaaagaaaaattaatttagaaagaagtagagatgtatttttttaaatgaaaaaaattgtattatattgtttatgagagttaagtgtttgggttgattgtttttaatagttttaggtgggttggggttgtgggtagagtaagtttaagaaggtttatgagttttaggattggttttttagggtggtttggttttagggatttgtgtttgtatttggtttaggtgtggttttatttttttatttttgaggtgggatggtagggtgtgtaggggttgggtttaggaaagagtttgttattttgtaggtgtttagtgtgggggagtggattttgttttaattaagatttgaaagtttttttaggtagtttttgagaatagttgattttgatttatgattgtagttttgaatttttatttttatgttgtttaattttgttaggttgggtttttatagtttttttttaaagttagtttagtgtggtttatatggttagatttaggtgaaggttttgtttattgttttttgaggtttagttgggttttgtgtagatttttgatttttagtttggtttttttagaggattttgttttttaatatttgttttttgaggtttttggttgttttttagatatgattttgattttagttattgtatttggtttattattttgtggtggttgtagtggtagttataataattgtgttgttttttgtttaatttttaagagttagttttgaagttaagtgtgagtagttttaaatttattgtgttaaagggttttggatttattaattgggtagtttgtagatttttaaagtagttaattagagtttagttatgttgggtaggtttttttgggtggttagagtgtgaaagaaagaggaaagggtggttagagaaaaagtaggagggtgggtgttaattgagtgtgagtgtaagtgtttttttttagttgggagagtgttgttttattgtttttagttagtggagtaggaagttattgtttgttttgttttttttttaaatttttttttttagtattggtatagtttaaatttattatatttaaaatagtttattaaaaaagtgatattgtgtttatattgagattttattatttttatttttaatatttagggttaggagtgtatagttatgtttttttaaatgtgtgatttgtgggttggttttaaggagtatattttagtgattttaagaaggaaatggaaaatttaaaagattgttttaaaaatgtaaaggaaaatttattatttatattgttgtgttttgtttttattttatttttgaatttaatattaaattattttattatttatattttgtttattatataattaaaaatatttgaaatgtattaaattttaaaatatttttatattagaattttaaatatatagagagaggtatgtatttagagattgggttttattatgttgtgtatgttggtttttaaattttgggtttaagtaattggttttagtttttagtgtagttgtgattataggtatttgttattatgtttggtttaaatataattaaaatataaaaatttataattttatgaggggagagaaagaggtttaaattatgttttaaataatttagtgttaaaaattttgtttttattgttatttattatatttttgagagagatttttgtatttattgtagttaatttttttttttttttttttgtttttttttttttttttttttttttttttattttttttttttttgtttgtttgtggagataatgtttttttatgttgttttagttggtttttaatttttaggttttagtaatttttttgttttggttttttaaagtgttgagattataggtgtgagttattagtttaatttaaatattattttaaaatttttttaaaataaataaatagaatagtaaaatagagttagatataataaaaatttattttaaggatttttggttgtattgattttaatgggatatagaataaagattgattattatatttattataagtatgtattagaagatttaaattaggatatggaatggaatttttttatttttgtgatatagagtatattatatgtatttaagtgtttaatattttttaatataatgagttgtatttattatttggtgttatatattgtatttggtttaattttgataatttttgtttttaggtaatagaggtagagtatttgggagttatggtgtaggtaggaatttaagaatttttgttggagtttaattatttttaaaatttatgtttaaaatttaaattttattttttaaatgaaaatttattgttttagagaagtgttttagggaattaggttgttttgtgtagtttatggtattggttttaatgaattttaatatgtttttttttttgagaggtttaagaggaatttaatttttatattatttaaaaatggtaattaatttattatatttattttatttttaatataaagaagattataagtttttatagttgtgatgttaggtgtattaatttaatttaattatttttttttataaagttttagaggttattgtaaatttatgttattattttggtaaatatagtttattattttttgggttaatttttatgtagtatttttaaagtgtaatattgtgttttatagatataaaaatgaataagatatagttattgttggaggtgttgagggtaggggagtaggatgataattgggaattt

SEQ ID NO: 269 - DNA, 6621 bp, Artificial Sequence
  chemically treated genomic DNA (Homo sapiens)
tttgtatttttagtagagatggggttttttttttttttttttttttttttttgagagggagttttgtattgttatttaggttggagtgtagtagtgttatttttatttattttaattattgttttttaggtttaagtaatttttttgttttagttttttaagtagttgggattataggtgtttattattatgtattattaattttttgtatttttagtagagatggggttttattatgttagttaggttggttttgaatttttgattttatgatttatttattttggttttttaaagtgttgggattataggtgtgagttattatgtttggttaagatggtgttttattgtgttggttaggttggttttgaatttttgattttggttttttaaagtgttgggattataggtgtgagttattgtgtttggttaggagttttattgtgaagggaaggaatgaatatagttggaggggaaagtggtattaaggaaaggttttttattattaataataaatattttattgaaatatattatttatatagaatagttaataaattttgagtgtgtagtttaatgaatttttataaggtgaatatatttaggtaattagtatttagattaagaaatggaaagtggttaggtgtagtggtttatgtatataatgttaatattttgggagtttaagatgggaggattgtttgagtttgagagtttgagattagtttgggtattatagttagatttttgtttttaaaattatatatatatttttttttgagatagagttttgttttgttgtttaggttggagtgtaatggtatgattttagtttattgtaatttttgttttttgggtttaagtgattttattgttttagttttttaagtagttgggattataggtgtgtgttattatatttggttaattttttgtatttttagtagagatggagttttgttatgttggttatattggttttgaatttttgattttatgatttatttattttggttttttaaggtgttgggattataggtgtgagttattatgtttagttaaaataaaaaataaaatttttaattagttaggtttatgggtgtatgtttgtagtttaggttatttaggaagttgaggtgggaggattatttgaatttagaagtttgaggttatagtgagttatgattatgttattgtattttaatttgggttatagagtaagattttgttttaaaaagtgaaaaataaataagaaatagaatatgattagttgttaatattttttttatggttttttgtagttattattatttttttgaaaggtaattagtattataattaattttttttttttttgagatggagttttgttttgttatttaggttggagtgtagtggtttaattttggtttattgtaatttttattttttgggtttaagtaatttttatgttttagtttttatagtagttgggattatagttgtgtattattatatatggttaatttttgtgtatgtatatatgtgtgtatatatatgtttgtgtatattatatgtgtgtatatatgtatattatatatgtgtgtatatatgtatatatatatatatatgtatatgtatatatatatatatatgtatatgtatatatatatatatatgtatatgtatgtatatatatatatgtatattatgtatatatatatatgtatgtatattatgtatatatatatatatatatgtgtgtgtgtgtatatatatatatatttttttttagtagagatgaggttttattatgttggttaggttggttttgaatttttggttttaagtgatttgtttgttttagttttttaaagtgttgggattataggtgtgagttagatttaaatagtatgttttttttgtgtttttttttttatgtttgatagttgatgtgagatttatttttattgtgggtagtgtttttgttttttttattattgtataaaataattttgttttatttatttattttattgttgatgggtattagggttgttttttgtttggagttaaaatgattaatatggttatgaatatttgtgtatatgtattttggtatatttgaattgtattgtagtttttgtgttaatttttttttttttatggttttttgtggttatttttttgtttttttatatgatttttatagttgtttgtgattttattttggttatttttagtgatttttttgggtgtatttttgaattatggatttggttatttttttgtggtttttattttagttttagttttgtggttttgttttattatattaagtttttaatgttggtgttttttagatttagggttttaaaaattttttgtatatttttaatgggtattattatttttatgttaattaatattaaatttgttttttgattatattttttagttagtttattagtataaaattgagtttattaaatttttttaagaagtatgtttttaattgttgaaatgttatatttatttaggtatttgaattattatttaagaattattttagtttttttttttttttttagttttttataattttaatttttaattattaaaatttgatgagatttattttttttagggtttatagaattattttttttttttgtttttaaggtttttattttgttttagaattttttagatttttgagatagttattttttttttttttaggtttttttatttttttttattgatttattttaaagtaaatttgatttggttattatatattttttattgtttataggataaggttaaattttttagtaaattttaatttttttaagaattgttttttatagttagttttatgtgtttattttagaattgattggattaatttaggagtagtttttggtaagtatggtgtttttttttattttttggttgttgagggttgtttttttagaaagtattttttattagttttaagttttttttttttagtaattttgatttttagttttaattttttttaggatgtgttttttattgtattgttttttttagtttttgttttttttttaggtgtttattatttttttataaattatagttattgttatggtaataattttattattagaaggagttttatgtttagtggattagagttttttgagagtagggattgtggtattattttaagtattgaatttgttttagtaatttttaaataaatatatgttgaatgaatgaatgtagtaataggaatgttgagttaagttttgtttttgttttttgagatggagttttgttttgttgtttaggttggagtgtagtggtttggttttggtttattgtaagttttgttttttgagtttagttatttttttgttttagttttttgagtagttgggattataggtgtttgttattatgtttggtaattttttgtatttttagtagagttgggttttattatgttagttaggatggttttgattttttgattttgtgatttgtttgttttggttttttaaagtgttgggattataggtgtgagttattgtttttggtttgttgagttaagtattaaattatataaaatataggaggagaggaaagtatttagagatatgatagggagaattatttgaaatagtgggattatagattatgtgaattgtgtagagaggtttaaatagtttggggtttttggagggaagggaggtttttgggtggtggagtattggtgtatagaaaaggagatgaattttgagagagaggttttttattgtgaagggtttggtgttggggttaaaggtttggggtttttatttgtttagtatggttttttaaattgtagggttttttttttttgagtggggggtagggggtgttttattttgttgtttaggttggttttaaatttgtgggtttaggtaatttttttattttgtttttttaaagtgttgggatgataggtgtgagttattaagtttagtagtaggttgtaattaaattatgtatttatggtttttaaaatttgtttaggagttgttataggtttggtgttgtaaaagtaaatatgtttatttagaaaatggggataatttttatgttatagagttgtaaagattaaatgaattaatatagattaatatattgggaatagtgttaagtgtataagtattatgtaaattttagttattatttgttattattgtgtttgttgttatttttttttaggagtttttagggggttaagaagtggtgggaaagaaagaaatgattttaagagtatttaataagggttagaatggaagtgagtaaaaaatgttgaggtttatagtataggttgtattgtggggtttaaattttatgaggttagtagtatttagggtttgtgagttttttagagttgggttttggtggttgagtttagttttgggggttattgtatttttttttttattataaaatggggtttggaggtttggggtggaagaaaggggtttataatattgtatggttagaggttgagttaaggttggatttggttagatttttataggttttttttagtttttatattgttttagagtgtggggtgtttggttgggggtgaggtagtggaggtttaaagggggttgaagttaattggatggtagtttgtgatgggaattatgttttttagtatgtgatggggtaaaggggttttttagttgtgagtagtgttttgtaggttttgttgggagtttttattgatttttgtttttttttttattttgatttttgtttttttgttttgggttttgtttttttttgagagttgatgatttggtagagttttgtgagttgttttttttttttttttttattggtttagtttagttgttatttggttgagaggaggagaagttgtttattgattggtggattttgtttggtgttaattaggaaaggggggtggggtagtagttggttttattgagttgttattattgtgaaaggttggtttggttgtgatagtttgggtaagaggtgtaggttggtttggttttttgttatttggagttgggtaagtgggtgggagaatagtgaagatagtgtgagtttgggttgttgttttgaggtttttgtttggttttttttgttgatttgttatgtttgtttggatttaatttttaggttgttggtgtttgtttgtttgttggttttgtggtgtgagagggaagtatttgtgtttgtggttggtggttggtgtttggagggtttgtatatttgtttggttgtgttgtttgtttgtggtagttgtgtttttgaattgtggagttgtgtttgtgtttgatttgtgggtgttggtggtgtgtggttgaggttggtgttggtggggtggggtggttgtggtggaggtagaggaagagggagtgggagttttgtgaggttgggtgttgttatggaattgggtttggagtttttgtattgttgttgtatgttttttgtttgtagttttttttttgtgttgtagtttgttgtgaaggtgttatttggtgttttagttgttgggggattgttgtttgttattaatttgattgttattatggattagttgtagggtttgggtaggtaaggagagattggtgggtggtgttttgggtttttggttttggtgttggttttggagagattaggttaggaaatggattgggagaagggtgagatttgtttgtttgggtttgttgtttggggatagttgggttagggtttgttatgtgtatttttgtttgggtggaatgttgggtgggagaggttgttgggattttttaggggaagaggtggagatttttgggtttaagtttgagttaggtttatttttattttttttggattgttttgtattttttttttatttttatttttggaagttttttggaatttatttttgtggggaaaattaggtttttttaggtatttatttttattttttgttaaattatttttaggatttttgtttgttgtgatttttgtttttttttaataaaggattatggtatttttttttttggtgtttatgtaaaattattttagttttttgttttgtgtatatttttgatgtttattttgttgtttttttaaggttaggtttttttatttaatttttagaaagttttttgggttttttttgatagtaaaaaatgtattttatggtgttttttgtggaagagttattttttttttaatttttggtattttgtttgttaagtatatgttttgtgtgttttttaatttttgaaaagtagaaagtgttttgtttaatttttattttgattttgttttagtatttagaatatatgtttttattttaggaaatattttaatatttgttatagttattataatttgtaatgtggtttaaggttatgtttatttatttttttttttttttttgtttaagtgttaattgggtgtttagagtggtaaagtgggatttttgttatttgtggtgtggtttagaaatggtttttggtagtttggttgttttttaattttatggtttattttttgtatgtgattttttaattatattttataaattatttatggtttatttttgttggttttagt

SEQ ID NO: 270 - DNA, 6621 bp, Artificial Sequence
  chemically treated genomic DNA (Homo sapiens)
attgaaattaatagaaataaattatgaatgatttataggatataattaaaaggttatatgtaggagataggttatgagattaagaagtagttaggttgttagaaattatttttaggttatattataagtggtaaagattttattttgttattttgaatatttaattagtatttgggtaaaggagaaaaaaggagtgggtgggtatggttttggattatattgtaggttatgatggttatggtaaatgttggggtattttttaaaataaaagtatgtgttttaagtattgagatagagttgggatgaaagttgaataggatattttttgttttttagaagttgggaaatgtataagatatgtgtttagtaaatgggatgttagagattgaagggaaagtagtttttttgtgggaaatattgtgggatgtattttttgttattaggaaaagtttaggaagttttttgaaagttgggtaaaaagatttggttttaggaaagtagtagagtggatattaggaatgtgtatagggtgagggattgagatgattttatataaatgttaggaaagaaaatgttatggttttttgttgagaaggaataaagattatagtaaatgaagattttgaggatggtttagtaaagggtgaaagtgagtgtttagaagagtttgattttttttgtgggggtagattttaaagagtttttagggatagagatagaaggagagtatggagtaatttgaaaggggtgaaggtgggtttggtttgggtttaggtttaaggatttttatttttttttttggaaggttttgatggttttttttgtttaatattttgtttgggtgggggtgtatatggtaggttttagtttggttgtttttgagtggtgaatttggatggatgggttttgttttttttttggtttgttttttggtttgatttttttgaggttgatattgaggttaggggtttggagtattgtttgttggtttttttttatttgtttagattttgtagttggtttatagtgatggttaggttggtgataggtgatagttttttggtggttgaagtgttaaatagtgtttttatgatgggttgtgatgtgggaggggggttgtaggtgaagagtatgtggtggtggtgtgggggttttgggtttagttttatggtggtgtttggttttgtagagtttttgttttttttttttttgtttttgttgtgattgttttgttttgttgatattggttttggttgtgtgttattggtgtttgtgggttaaatataaatatgattttgtggtttagggatgtggttgttgtgggtaagtggtgtggttgggtgggtgtgtggattttttaggtgttagttattagttataggtatgggtgttttttttttatattgtgaggttagtgggtgggtgggtgttggtaatttgaagattaaatttaaataaatgtggtgggttggtaagagaagttgggtgagagttttgaggtaatggtttaggtttatgttgtttttgttgtttttttatttgtttgtttagttttgggtagtagaaaattaagttgatttatattttttatttaggttgttgtagttaggttggttttttgtggtaatagtggtttagtggggttagttgttgttttgttttttttttttagttggtgttaaatggaatttattaattagtaagtaattttttttttttttaattgaatggtagttaggttgggttaatgagaggggaagaagaaagtggtttgtgggattttgttaggttattggtttttagaagggggtggagtttagagtagaagagtggggattaaaatgagagggggagtagaggttaatgaaaatttttagtagaatttgtgaggtgttgtttgtggttgaaaggtttttttgttttgttgtatgttgggaagtgtagtttttattgtgagttgttgtttagttagttttggttttttttgggtttttgttattttgtttttagttgggtgttttatattttgaggtaatgtggaggttaaggaagatttgtggaggtttggttggatttagttttggtttggtttttaattgtgtagtattgtggattttttttttttgttttgggtttttaggttttattttataatgagggagggaatgtaatgatttttaggattggatttgattattagggtttaattttggagggtttatagattttgggtgttgttggttttatgggatttgaattttgtagtataatttgtgttgtgggttttagtattttttgtttatttttattttagtttttattggatgtttttagaattattttttttttttttattattttttagttttttgggagtttttagagagaaataatagtaaatataataatagtaaataatagttaaagtttatataatgtttatgtatttgatattgtttttagtgtgttaatttgtattaatttatttaatttttataattttgtgatataggaattatttttattttttaagtgggtatatttatttttatagtgttgaatttgtggtagtttttagatggattttgagggttataagtgtatgatttaattgtaatttattgttgggtttagtggtttatgtttattattttagtattttgggagggtgaggtgggaggattgtttgagtttatgaatttgagattagtttgggtaataaagtgagatattttttgttttttatttaaaaaaaaaaaattttatagtttgaaaagttatgttggataggtggaaattttaaatttttggttttaatattagattttttatagtgaggaattttttttttaggatttatttttttttttgtgtattagtgttttattatttaggaattttttttttttttagaaattttaggttatttaggtttttttgtatagtttatatggtttgtggttttattgttttaaatagttttttttgttgtatttttgaatatttttttttttttttgtgttttatgtggtttaatatttggtttaataggttgggagtggtggtttatgtttgtaattttagtattttgggagattgaggtgggtggattatggggttaggagattgagattattttggttaatatggtgaaatttggttttattaaaaatataaaaaattattgggtgtggtggtgggtgtttgtagttttagttatttgggaggttgaggtagaagaatggttgaatttgggaggtggagtttgtagtgagttaagattgagttattgtattttagtttgggtaatagagtgagattttgttttaaaaaataaaaataaaatttggtttaatatttttgttattgtatttatttatttaatatatgtttatttaaggattattagaataaatttagtgtttgaaataatattataatttttgtttttagggagttttggtttgttgagtataaagttttttttaataatggaattattattatgataatagttgtggtttgtggagggatggtgggtatttagaggaggggtggggattggggaaggtagtatggtggggggtatgttttaaaggagattaaaattaaaggttaaggttgttggagaaggggagtttggggttggtgggaagtgttttttaaggaaatggtttttggtagttaggaggtgaggaggaatgttgtatttgttgggagttatttttgagttgatttagttggttttagaatgggtatatgggattggttgtgagggatagtttttgaaaggattggagtttgttgaagagtttggttttattttgtggatagtggagggtgtgtgataattggattagatttgttttagggtggattagtggaggagagtggggaggtttgaggaaaaaggaggtggttgttttaaaagtttgggagattttgaagtaaggtgggggttttggagataaaggaagggaatgattttgtgagttttgaaggaggtagattttattagattttgataattgagagttaagattgtagggggttagagggaagggaggaggttagaatgatttttaggtaatgatttaagtatttgggtggatgtaatattttaataattggaggtatattttttggaggaatttgatgagtttagttttgtgttggtggattggttggggggtgtagttaggaggtagatttggtgttgattagtatgaagatggtaatgtttattgaggatgtataaagggtttttaggattttggatttggggagtattagtattgaggatttgatgtagtgagataggattgtaaagttggggttgagatagaaattataagggagtagttgagtttatagtttagaggtgtatttaggagagttattgaaggtggttagaatgaggttataggtaattatggaaattatgtaggaaggtgaggaggtggttatagaaggttatgggaagggaaaagttggtatagaagttataatatagtttaagtgtgttaaaatgtatgtatataaatatttatggttatgttaattattttagttttaaatagaaagtaattttaatgtttattaataataaaatgggtaaatagaataaagttattttatatagtgatgaaaaggatagaagtgttatttatagtaggagtgaattttatattaattgttaaatataagaaggaagatataaaagagatatgttgtttaggtttggtttatatttgtaattttagtattttgggaggttgaggtaggtgaattatttgaggttaggagtttgagattagtttggttaatatagtgaaattttatttttattaaaaaaaaatatatatatatatatatatatatatatatatgtgtgtatatatatataatatatatatatgtgtatatatatataatatatatatatatgtgtatatatatatatatatatatgtatatatatatatatatatatatgtatatatatatatatatatatatgtatatatatatatatatatatatatgtaatatatatatatatatatatgtaatatatataaatatatatatatatatatatatatatatataaaaattagttatgtatggtggtgtataattgtaattttagttattatggaggttgaggtatgagaattgtttgaatttaggaggtggaggttgtagtgaattgagattgagttattgtattttagtttgggtgatagggtgagattttgttttaaaaaaaaaaaaagttagttatggtattagttattttttagaaagatggtggtgattgtaaggggttatgaaggggatattggtaattggttatattttgttttttatttattttttattttttgagatagagttttgttttgtggtttaggttggagtgtagtgatatgattatggtttattatagttttgaatttttgggtttaagtgatttttttattttagttttttgagtagtttgaattataggtatgtatttataaatttagttaattaaaaattttattttttattttggttgggtatggtggtttatgtttgtaattttagtattttgggaaattgaggtgggtggattatgaggttaggagtttgagattagtgtggttaatatggtaaaattttgtttttattaaaaatataaaaaattagttgggtgtggtggtatatgtttgtaattttagttatttgggagattgaggtagtagaattatttgaatttaggaggtggaggttatagtgaattgagattatgttattgtattttagtttgggtaatagagtaagattttgttttagaaaaaaatatatgtataattttagagatgggagtttaattatgatgtttaggttggttttaaatttttgagtttaagtgatttttttgttttggatttttaaagtgttagtattatatgtatgagttattgtatttggttattttttattttttgatttgggtgttggttatttgagtgtgtttattttgtggaaatttattgagttatatatttaagatttgttagttgttttgtatgaatggtgtattttaatgaaatgtttattattagtgataaaaagtttttttttgatgttatttttttttttaattatatttattttttttttttatagtaaaatttttggttgggtatagtgatttatatttgtaattttggtattttgggaggttgaggttaggagtttaaaattagtttggttaatatggtgaaatattattttggttgggtatggtggtttatgtttgtaattttagtattttgggaaattgagatgggtggattatgaggttaggagtttaagattagtttggttaatatagtgaaattttatttttattaaaaatataaaaaattagtggtgtgtggtggtgggtatttgtaattttagttatttgggaggttgaggtaagagaattgtttgaatttgggaagtggtggttgaagtgagtggagatggtattattgtattttagtttgggtgatagtgtgagatttttttttaaaaaaaaaaaaaaaaaagaaaagaaagttttatttttattaaaaatataaa

SEQ ID NO: 271 - DNA, 2976 bp, Artificial Sequence
  chemically treated genomic DNA (Homo sapiens)
gaggttgaggtaggtggattatttgaggataggagtttaagattagtttggttaatatgatgaaattttgtttttattaaaaatataaaaattagttagttgtggtggtgtatgtttgtaattttagttatttaggaggttgatagaggagaattgtttgaatttaagaggtgaaggttgtagtgagttaagaatatattattgtattttagtttgggtgatagagtaggattttgttttaaaaaaaaaagagttggttagtgttaaatgtttagtatagagattggtatagtaatttttaatgtttagtatttattgttattattttttttttttttttttttttgagatagagttttgttttgttgtttaggttggagtatagtggtgtgattttggtttattgtaagttttattttttaggtttatgttatttttttgttttagttttttgagtagttgggattataggtgtttattattatgtttggttaattttttgtatttttagtagagatggggttttattgtgttagttaggatggttttaattttttgattttgtgatttgtttgttttggttttttaaagtgttgggattataggtgtgagttattatgtttggttttattgttattatttttattttttatttttgtatagagtatttatggtttaagaaatatttgttattttaattgtatgggagttttataatagtatagggagatatttttgattattatttttattaggagggtggagaaattgaggttttgggaggtggttttgatttagggaattaatttgttgatttattaatttatgaagttttatagttaaaaaagattagattaaaaaatgagaatttagtaaaggggttgaggtaggaggattgtttgagtttagaaatttgagattagttttggtaatatagtgagattttttttttagaaaaattttttaaaaaattaggttgtttgaggtagagtgtagtggtttatgtttgtaatttaatattttaggaggttgaagagggtggattatttgaggttaggagttttagattagtttggttaatatggtgaaattttgtttgtattaaaaatataaaattagttggtgtggtggtatatgtttgtagttttagttatttaataggttgagataggagagttttttgaatttggtaggtggaggttgtagtgagttgagattgtgttattgtattttagtttgggtaagatagagtgagattttgttttaaaaaatataaataaaataaataaataaaaaattaggttgttagtttagtggtttatggtttatatttgaaattttagtattttgggaggttaaggtaggaggattgttttagtttaggagtttgagattaggttgggtaatatagggagatatagtgtttttattgtttttgtttgttttgatttgtttttttataaaaaggtaaaagaaaaaaaaattagtttggtgtggtggtgtgtatttgtatttttagttattagagaggttggggttagaggattgtttgagtttaggagtttgaggttgtagtgagttgtgattgtattattgtattttagtttgggtgaaagagtgagattttatttttaaaatgaataaataaaaaattttaaaaaataaaagaatttagttaagtgtaaaagttttttttgattttaggttttagtgagttattggtggggttgggatttgaatttagtggaattagaattgtgtaggttttataatttatttagattttagtaattttaggttagagggttattgtgtttatgtgaggttgggtgggtgggttgttagttttgttttggggaggggtttgtgttgttgattggttgtggttggtaggtgaatttttagttaattagtggtatggggggtggtgtttttggggtttatttggttgtagttatgtatttttttttagtggtgttggaattgtaaagtatttgtgagtttgtggaagttagtttagattttagtttgttttagtttggtttgatttgattgtatttggtgtttgtttttgtttggtgtttttggttagttatgggtttttggagttgtagttttttggtgttgttgttgttgttgtaggtattttggattttttgatttgtgagggatgtatttgggttgtaagttttgtgttttagttttgtgttttttttttttttgttgttattgtttttttttttttaagaaagtttgggttttgaggagtggagtggtttggaagttttgtgtgttttggattttttagtgatgggagtggggggtgggtggtgaggggtgagtgtggtttttttgttttttttagtgtagattgaggtgggggtgtttggttgtggagtttgtggggtgggtttgtgtgggtggtgggggtgtgaagtggggtgtagggggtggggtgtggagaaggggtgttttggtgtaagttgagggggagttaggagttgtggggatgatttttgagggaaggagaggggtatttgtagaaataaaggtatttgttatgttaagaaaggttgtaaataggagtgagggttttggggataagaaagtgaggttggaggaggtgggagtgttttttgttttgaggagtggtgtatttttggtttaaggaaagtggggtattggagaataaagatatttttaataaaatgagaaaggagattgaaagggaatggtgggttaggttttgagggggtgatttggtggtttttttttgggagtttttgggggtttggtggttgtaggttttggggtgggggagggtgatgttgttgtttgtttgttttggggttgtgggttggggtttttttttaattttgatgttgggagtgagggaggggtggtgttgttggttttggtgagtaggagggaattttttgagttatttggttttatttattttttttttattttagg

SEQ ID NO: 272 - DNA, 2976 bp, Artificial Sequence
  chemically treated genomic DNA (Homo sapiens)
tttggggtgggggaaaggtagatggaattgggtgatttggagggtttttttttgtttattgaaattaatagtgttgttttttttttgtttttggtgttgggattgggggaggattttagtttgtagttttgggatgggtgggtagtgatgttatttttttttattttgaaatttatggttgttgagtttttaggaatttttgggagggggttgttgagttatttttttaagatttagtttattgtttttttttagtttttttttttattttattggagatgtttttattttttagtattttattttttttagattgggaatgtattattttttagagtgaggggtgtttttattttttttgattttatttttttatttttgggatttttatttttatttatgattttttttggtatggtaggtgtttttatttttatggatgttttttttttttttttgaagattgtttttatgatttttggtttttttttgatttgtattagggtattttttttttatattttattttttatattttgttttatgtttttattgtttgtgtgagtttattttgtggattttgtggttagatgtttttgttttggtttgtgttggagggggtaggaaagttgtgtttgttttttattatttattttttatttttattattggggggtttggagtgtgtgaggtttttaggttgttttgttttttaggatttgaatttttttggaagaagggaagtggtgatgatgggagaggaaggggtgtagggttggggtgtggagtttgtggtttgaatgtgttttttgtaagttaggggatttggggtatttgtagtagtagtagtagtgttgagaggttgtggttttaagggtttatggttggttggggatgttgagtgagggtaggtgttgggtgtggttgggttgggttgggttggagtgggttggagtttgaattgatttttgtaagtttataggtgttttgtagttttgatgttattgagagggggtgtgtggttgtagttaggtgagttttggaggtattgttttttgtattgttgattggttgagggtttatttgttggttatagttaattagtagtgtggatttttttttagggtggagttgatggtttgtttatttggttttgtatagatgtggtgattttttagtttggagttgttagggtttaggtgggttatgggatttgtatggttttgattttattgggtttgaattttagttttgttggtggtttattaagatttgggattagaaagggtttttatatttggttgagtttttttgttttttgggattttttgtttgtttgttttggagatggggttttatttttttatttaagttggagtgtagtggtgtgattatagtttattgtagttttgaatttttgggtttaagtggttttttggttttagtttttttagtagttgggagtataggtgtatattattatgttaggttaattttttttttttttgtttttttgtagagagataagttggggtggataggggtagtgggggtgttgtgtttttttgtattgtttagtttggttttgaatttttgggttgaagtgatttttttgttttggttttttaaagtgttaggattttaggtgtgagttatgagttattgagttagtagtttaattttttgtttgtttgttttgtttgtattttttgagatggagttttgttttgttttgtttaggttggagtgtagtggtatgattttggtttattgtaatttttgtttgttgggtttaagagatttttttgttttagtttattgagtagttgggattataggtgtgtgttattatattggttaattttgtatttttagtatagatggggttttattatgttggttaggttggtttggaatttttgattttaggtgatttattttttttagttttttgaagtgttggattataggtgtgagttattgtattttgttttgagtggtttaattttttaaaaaatttttttagagaggggattttattatgttgttgaggttgattttaaatttttgaatttaggtgatttttttgttttagtttttttattgagtttttattttttaatttagttttttttaattgtagagttttatgggttagtgagttagtaaattgattttttaggttaggattattttttaaagttttagtttttttatttttttaatgggaataatgattagaaatgtttttttatgttgttgtgggatttttatataattaaaatgataaatgttttttgagttataaatgttttgtatagaagtgaggggtaaaaatagtaataatagggttaggtatggtggtttatgtttgtaattttagtattttgggaggttgaggtgggtagattatgaggttaggagattgagattattttggttaatgtagtgaaattttgtttttattaaaaatataaaaaattagttaggtgtggtggtgggtgtttgtagttttagttatttgggaggttgaggtaggagaatggtatgaatttgggaggtggagtttgtagtgagttgagattgtgttattgtattttagtttgggtgatagagtaagattttgttttaaaaaaaaaaaaaaaaaaaaaatagtaataataggtgttggatattgaagattattgtgttagtttttgtgttaagtatttgatattgattagtttttttttttttgagatggagttttgttttgttgtttaggttggagtgtaatggtgtgtttttggtttattgtaatttttgttttttgggtttaagtggtttttttttattagttttttgagtagttgggattataggtatgtgttattatgattggttaatttttgtatttttagtagagatagggttttattatgttggttaggttggttttgaatttttgtttttagatgatttatttgttttagtttt

SEQ ID NO: 273 - DNA, 2310 bp, Artificial Sequence
  chemically treated genomic DNA (Homo sapiens)
taaggggtgggatttggatttgaatttaggtggggttggttttaagggtttatgttaggtttgagagagtaagatttttatttttgtaatgtaagtaatttatggtttagttataggtttggtggggaggaggatggatagattattaggttagttttggaaggttaaagaatttgttatttaaaattttaggttgggttttgttttttatgtttgtaattttagtattttaggaggttaagggaagtggattatttgaggttgggagtttgagattagtttggttaatatagtgaaattttgtttttattaaaaatataaaaattagtttggtgtggtagtgggtgtttgtagttttagttatttgggaggttgaggtaggagagttgtttgaatttgggaggtggaggttgtagtgagtagagatgatgttattgtattggatgatagtgagattttattttaaaaaaataaataaaataaaaaaatttttttagtttttagtttgttttttaaatttttaaatttgagttggggatggggagggagaaggattaggaggtggtatttagggttttttaaggtagtagtagaaggtgaaggaggagtgaggggataggtgagagagattgattgggaaagtttagttttgtggggaagggtttgtggggtagtgattgagatttaggattgtttttatggttagagtttatttgtgtgtagtaagaggaaagtattttgtgtttaatgtagtggaatgagagtaatgtagaagaataatgaattttaggtttggtgtttattttttaggaagggtgtgggagagttgttttttaagggagattttttggaggttgttttgtgtagtaagtagtttttatttagattatatatagtattttagattaattttaaaatttttgtgttttaaaaattgtttttatttatattttatagaaagttgagaaagtgttatttatatggggggtaggggtgttggagattatgagattaataataatttttttagtttgtattttttggtattattatagtttttaaattttgggatttttttgattagtttttttttgtttagttgtgaaatggaagaagtggtttgggtgtggtggtttatgtttgtaatttgagtattttgggaggtggaggattgtttgagtttagaagtttaagattagtttgggtaatatagggtgattttttattttttttttgttttattatattgttataaaaaatttttaaaaattagttgggtgtggtggtgtaagtttgtagttttagtgggagttgagggaggagaattgttttagtttgggaggttgaggttgtagtgagttgagattgtgttattgtatttttgggtgatagagtgagattttgtttttaaaaaaaaaaaaaaaagaaaaaagaggaagttgtatttaatttagaaatgtggttttttgggatttgttagttttatattttggaggattttttttggtgggttggtatgggaggtggagaaagaggtttgggtggttttgttgtagttgtgtgtgggaggatgtatgggtttgttttaaagttttgggataatagtgtttttgggggataatgaatgtggagtttttgtttttagttgattttagatgtgtttttatttttttttgttgtagttgtaaggtaaggaaatatttttttttttgtattgaggaggttgaggagtgtattgggtgttttttttttttttaatttagaattgtgagatagaggttgagtttttgtaaagaatagttttagaaaagttaggagagtgtaggagggtatttgggaggttaggaggggtttgttggggttttaattgtatttatattggttttatttgtgagggggtgggattttgtggtgttggattaattagtatttatttgtgtttatttggtttttttttgttggtttttgggggttgtggtgtttaaaggggtaagagttgagtggaatattggtttgttgttgtggtagttgttttatttttttttttgtagttatggggtttttttgtggattttttgtgttttttttttttttttaggtattttatagttttgttgtggttttgattgggattgttttttggggggtgggtggggtttgtatggggtagtggtgttggggagagtgtggggttgtgttttttggggttaagggagttttggaaggtttgtgaggattttgtggtgtggggagtgtagggttgggtatgtttggatttagttttttttattttttgtttttgggtgtagg

SEQ ID NO: 274 - DNA, 2310 bp, Artificial Sequence
  chemically treated genomic DNA (Homo sapiens)
tttgtgtttgagggtagagagtgaaggaggttgggtttaggtgtgtttggttttgtattttttatattgtagggtttttatgggttttttgggatttttttggttttagggagtgtagttttgtgttttttttgatgttattgttttatgtggattttgtttgttttttagggagtggttttggttggggttatggtgaggttgtggagtatttggagaaggaggagagatgtgagaggtttatgagggagttttatggttgtagagagaggggtgaagtagttgttgtgatggtgggttggtgttttgtttagtttttgtttttttgagtattgtagtttttgggagttagtgggaggaggttaggtgagtgtaggtgggtgttgattggtttagtgttatgaggttttgtttttttgtaggtgggattgatgtgggtgtggttgaggttttagtgaattttttttggttttttggatgtttttttgtgtttttttggtttttttggagttgttttttatagggatttagtttttgttttgtagttttgggttagaggagaaaagaatatttagtgtattttttagtttttttagtatgggaagagaaatgtttttttgttttgtggttatagtggaaaaaagtggagatatatttgaagttgattgaaaatggaggttttgtatttattattttttggaggtgttgttattttaaagttttgaagtaggtttgtgtgtttttttatatgtggttatagtggggttgtttaagtttttttttttattttttgtgttagtttgttggggaggattttttggggtataaaattagtaggttttgaaggattgtgtttttgaattggatataattttttttttttttttttttttttttttttggagatagggttttgttttgttgtttaggagtgtagtagtgtgattttggtttattatagttttgattttttgggttgaagtgattttttttttttagtttttgttgagattataggtttgtgttattatatttggttaatttttaaaaattttttgtagtgatgtggtggggtggggggagggtggagggttattttatgttgtttaagttggttttgaatttttggatttaagtgattttttgttttttagagtgtttaggttataggtatgagttgttatatttggattgttttttttattttatagttaaataaagggaagttagttgagaaagttttagagtttggaagttgtagtggtgttaaagggtgtgagttaagagggttgttattagttttataatttttagtatttttattttttatataaataatatttttttaattttttgtaaaatgtaaataaagataatttttaaaatgtagaggttttgaaattggtttgaaatattgtatataatttgggtaaaaattgtttgttgtgtaaagtagtttttagagagttttttttggaaaatagtttttttatattttttttaggagataaatgttagatttgggatttgttgtttttttatgttatttttattttattatgttagatatgaagtgttttttttttgttgtatataagtgggttttggttatgaaaatggttttgagttttaattattattttataagtttttttttatggagttgagtttttttggttagttttttttatttgtttttttattttttttttattttttgttgttgttttgagaagttttggatgttattttttggtttttttttttttttgtttttagtttagatttaggggtttgaggaatggattggagattggagaggtttttttgttttgtttgtttttttgagatggagttttattgttgtttagtatggtggtgttatttttgtttattgtaatttttgttttttaggtttaagtgatttttttgttttagttttttgagtagttgggattataggtgtttattattatattaggttaatttttgtatttttagtagagatgggattttgttatattggttaggttggttttgaatttttgattttaagtgatttgttttttttggttttttaaagtgttgggattataggtgtgagaaatggggtttagtttggagttttaaatgatagattttttgattttttagggttaatttggtaatttatttgtttttttttttgttaggtttgtggttaagttatggattgtttgtgttgtgagggtgggggttttgtttttttaggtttagtatgggtttttaaggttggttttatttgggtttaaatttaggttttatttttta

SEQ ID NO: 275 - DNA, 4233 bp, Artificial Sequence
  chemically treated genomic DNA (Homo sapiens)
  unsure (2320, 2321, 2336, 2351, 2363, 2413, 2723..2726, 3730): unknown base
ttttttttttagttgaagtattttttgtttgttttttagtgtatgggtggtggttatgtgtttagaatgtttggtgtttgttttgtttttttagtttttgtgtgtttttttggtagttggttatatggtgagggtgggggtgagggggtttttttagtttgtggtttgtgtttatggttgggttttttgtgtttagttgttttggattgagtttgggtgtatggggttgtaggaattggttttggggttttgataatgggttgtttttatagtattttgggttggtgtgaggtaagtgtagtttttttttaggaatgagaattagtgtttgttttttttatagttttttatgtgtttgttttgtgagttggttatggaagggttgtttaagggtgggaagtggggtttttgtggttatgggaaagtataattttagggattgaggtgtaggatttttgatgtaaggtatgtgttatgtgtgatttttgtgtggggtgtgattgttttaaaggaaaaagtgttttttattgtagggttttatgtggttggaggggttggtattgagttattgtgttatttttggggttggttttaaggaagattgggagtgggggatgggatgttggtggtgttttttgtgttttttttttgggagtttttttgttgttgtaggttatattattttaattttgtaagtgatttttggtgataggagtttgtgattgtagggttttttttgatttgagaatggttattttttgatatgagttagtggttgaaattggtgttggtgtttatgggatagtgtataaggtttgtgatttttatagtggttattttgtggtttttaagagtgtgagagtttttaatggaggaggaggtggaggaggtttttttattagtatagtttgtgaggtggttttattgaggtgattggaggtttttgagtattttaatgttgtttggtgagaaggtggtggagggttgggtgtggggagtaaagggaaaagatagtttataggtggggtgtgatgatttgtagagaagtggggattttgaggaaataatgagaggttatgttgggttaaaggggattgaaaagtgagtatttattttggttaggttgatggatgtttgtgttatattttgaattgattgggagattaaggtaattttggtgtttgagtatgtagattaggatttaaggatatatttggataaggtatttttattaggtttgttagttgaaatgattaaggtgagtggggttggtaggtattgagaggtggattgggatttttgtagtagaattttttgggattttaggtatggtgtttagtttttagtgtatttgtatttttttttttgaaattaggatttgatgtgttagtttttaagaggtttagattttttttatgttaattgtattgtttattgagatttgaagttagagaatattttggtgataagtggtggaatagttaagttggttgattttggtttggttagaatttatagttattagatggtatttatatttgtggttagtagaaagatggtattaaaatgggttttggttgggaataggagagtgattgtttgtagtaattgagaagttatgtgttttatgtgtttagttaagtaagttgtgttttatggtaatttatggggtttttatttattttttttattttttttaggttgttatattttggtattgagtttttgaagtttttttgtagtttatatatgtaatatttgtggatatgtggagtgttggttgtatttttgtagagatgttttgttgaaagtatgggatttatatattttggattattttgaattttttaaattgtttgtttataaattatatttatattttgtttattttttttttttgagattagggtttgttgtgttgtttaggttggattgtaatggtatgattatagtttattgtagttttaattttttgggtttaagtgatttttttattttagttttttaattagttgatattataggtatgtatttttatgtttggttagtttgttaatatttttatagagatggggttttagtatattgtttaggttggttttgaatttttgtatttaagtaatttttttatttttattttttaaagtagtataagttattgtatttggttttatttttttatttgtgtattattaatttgtttatagtagaaagttttgaaatgttttggaattaggaattttatatttttttattttttttattttttatttatttatttatttatttatttatttattgagataaggttttattttgnnatttaggttggagtntagtggtttaattanagtttattgtantttttattttttgggttaaagmaatttttttattttagttttttgagtanttgagattaaaggtgtatgttattatgattggttttttttttttttagatggagttttgttttgttgttaggttggagtgtagtagtgtgatttttgtttattgtaatttttattttttagatttaagtaatttttttgatttagttttttaagtagttgggattataggtgtatgttattatgtttagttaatttttgtatttttagtaatgataggttttattatgttggttaggatggttttgattttttgattttatgatttatttatattagatttttaaagtgttaggattataggtgtgagtnnnngtatttggtatttttttttttttaaaaaaagagataaggttttgtttgtttaggttgatttagaatttttgggtttaagtagtttttttattttagtattttaaagtgttggaattgttggtttttattttttatattttttattttgagttattaagtagtaattatttaattaagatatttttgaaaatgattgttattttatatttttttttattttaggttttttttttgtggaaattttgaagttgattagttgggtaaaatttttgagtaagtgattaatatgggagaaaaagattttttattttgagttttttttttgttgaatttaggatggtaattggttttgttatggggatgggaattggaggatttttttgattagagtttttttgttttttatagtttgattgggttgtttttagaggatgattggttttgagatgtatttttgttttgtggagtttttttttttagagggttttgtttagtgtagttggtggtatttgagatggaggagttgggagtatagttgttgttggtaattggagatggttgtgggtatagggaaagaaatagagattggggaaagaaatagagtagtatgtagggttttggttattgtggttaatgaaatttggttggtagatggtttgtagtttttattatagttgtaaatagttatttatagagaaggatatagaagagaatttattttggttgggtatggtggtttatgtttgtaattttagtattttgggaggttaaggtgggtgtattatttgaggttaggagtttgagattagtttggttaatatggtgaaattttgtttttattaaaagtataaaaataagttgggggtggtggtatatgtttgtaattttagttatttgggaggttgagataggagaattattttaatttaggaggtggaggttgtagtgagttgagattatattattggtattttagtttgggtgatagagtgagattttgtttntaaaaaaaaaaaaaaagaaaaaagaagaaagtttattttaggtattgttgtgggtggtagaagttgttttttttatggttttttgatttttgtttttttttttaggaaatgttgatttttaatttatataagtgaatttttgttttttgagttttgtagtatttttatttatataaggatgaaggtaatttggagtgagtaatggagtggttgttatggaaggaagaaaagttgttattttttttttggatattgagagggtaatttttgtttttatttttgaggttatggagggtttttttttatttttttatagagattattttgttgttttaatgatattttttttttatttttttttttgaggttttttttttttttttttatttttttatattaaggggtatgtttttttttgtttttttttttatttttatatttggggtttttttttatataggaaaaataaaattaaaagaaawaatggtttttttttttttttt

SEQ ID NO: 276 - DNA, 4233 bp, Artificial Sequence
  chemically treated genomic DNA (Homo sapiens)
  unsure (504, 1508..1511, 1821, 1871, 1883, 1898, 1913, 1914): unknown base
aaaaaaaaaaaaagggttattwttttttttggttttgttttttttgtataaaaaaggattttaaatataaaggtagggaaagggataagagggaatatattttttagtgtagagaaatgggaaggagaaggagaagttttaaaaggagaggtgggaggggaatgttattaaggtagtaaagtaatttttgtagaaagatggaggaggattttttatagttttagagataaaggtaaagattgtttttttagtgtttagaagggaaatggtagttttttttttttttatggtagttattttattgtttattttggattatttttatttttatgtagataagagtgttgtagagtttgaaaggtagagatttgtttgtgtgggttaaaagttagtattttttgaggggagaggtaaaggttagaaaattatgaagaaaatagtttttgttatttataataatatttgggatgagttttttttttttttttttttttttttttttgnagatggagttttgttttattatttaggttggagtgttaatggtatgattttagtttattgtaatttttgttttttgagttgaagtgatttttttattttagttttttaagtagttgagattataggtgtgtgttattatttttggtttatttttgtatttttagtagagatgaggttttattatgttggttaggttggttttgaatttttgattttaggtgatatgtttattttggttttttaaagtgttgggattataggtgtgagttattgtgtttagttaggatgggtttttttttatatttttttttgtgggtggttatttgtagttgtaataaaaattatagattatttattaattaagttttattaattatagtggttagggttttgtatattgttttatttttttttttagtttttatttttttttttgtgtttatagttatttttagttattagtagtagttgtgtttttgatttttttattttaggtattattgattgtattgggtggggttttttggggggaaaggttttatggggtagggatatattttgaggttagttattttttggaggtagtttaattaggttgtgggggataggagaattttggttaggagggttttttagtttttatttttatggtagagttagttgttattttgggtttagtagaaagaggatttagaatagaaaattttttttttttatgttggttatttatttaaagattttgtttaattggttggttttagagtttttatagaagagaggtttaaggtgagaagggatataaggtagtagttatttttaaagatattttagttgaatggttattgtttagtggtttaaaataggaagtatagggaataaaggttaataattttagtattttgggatgttgaggtgagaggattgtttgagtttaggagttttagattagtttgggtaagtaagattttgtttttttttttaaaaaaaaagaaatgttaggtgtnnnngtttatgtttgtaattttagtattttgggagtttgatgtgggtggattatgaggttaagagattgagattattttggttaatatggtgaaatttgttattattaaaagtataaaaattagttgagtatggtggtgtgtatttgtggttttagttatttgggaggttgagttaagagaattgtttgaatttgggaggtggaggttgtagtgagtagagattgtattattgtattttagtttggtgatagagtaagattttatttaaaaaaaaaaaaagttagttatggtggtgtgtatttttagttttagntatttaaggggttgagatgggaggattkttttagtttaggaggtagaggntatagtgagttntaattgggttattgnattttagtttgggtnntagagtgaaattttattttaataaataaataaataaataaataaataaataaaaaataaagagaataaagggatatgaagtttttaattttagaatattttagagttttttgttatgggtaagttagtagtatgtaagtaaaagaatggggttagatgtagtagtttatgttattttgggaggtaggggtgggaggattgtttgagtgtaagagtttaagattagtttgggtaatatattgagattttatttttataaaaatattaataaattagttaagtatggaggtgtgtgtttgtagtgttagttagttgggaagttgagatgggaggattatttgagtttaggaggttgaagttgtagtgagttgtgattatgttattgtaatttagtttgggtaatatagtaagttttggttttaaaaaaaaagaatgggtaaggtatggatgtggtttatgaataagtgatttggggaatttaaggtagtttagggtatgtgggttttatatttttgatgaaatatttttgtaaagatatagttaatattttatatgtttataggtgttgtatatgtggattgtagaagaattttgggagtttggtattagagtgtaataatttaaagggaataggaagaatggatggggattttatgggttattatgaaatataatttgtttgattgaatatatgaagtatatgattttttaattgttatgggtaattatttttttatttttaattagaatttattttggtattatttttttattgattatgggtgtaagtgttatttggtagttgtagattttggttaggttaaagttagttagtttgattgttttattatttgttattagaatgttttttggttttagattttggtgaatgatgtaattggtatgaaggaaatttaggttttttagaaattggtgtattagattttagttttaaagggggaggtatagatgtattggaaattaggtattatatttgaaattttagaaggttttattataaaggttttaatttattttttaatgtttattaattttatttattttgattgttttggttggtaagtttggtgggggtgttttgtttagatatgtttttaggttttggtttatatgtttaaatattagggttattttgattttttggttagtttgggatgtggtatagatgtttattagtttgattagagtaaatgtttattttttaattttttttaatttaatatggttttttattatttttttagggtttttatttttttatagattattatattttatttataggttgttttttttttttattttttatgtttaattttttattatttttttattggataatattgggatgtttaaaagtttttagttgttttagtaaagttattttatgaattgtgttgatgggaaggttttttttatttttttttttattggggatttttatatttttgagggttataaagtggttattgtggggattatgggttttgtatattgttttataggtattgatattaattttagttattggtttatattgagaggtagttatttttagattaagggagattttataattatagatttttattattaaaagttgtttatagagttaggatggtatgatttgtagtaataaagggatttttaaaaaaaaagtgtaaagaatattattagtattttattttttgtttttagttttttttggggttggttttagagataatataatgatttaatattaatttttttagttatgtgaggttttgtaatagaaaatgtttttttttttgggataattgtgttttgtataaagattatatatgatatatgttttgtattgaagattttatattttagtttttaaaattatatttttttatgattataaaggttttattttttgtttttgagtgatttttttataattagtttgtgaaatgaatgtgtggaaagttgtgaggggggtgggtattggtttttatttttgggaagggattgtatttattttatgttagtttggggtgttgtgggggtggtttgttattggggttttggagttggtttttatggttttatatatttgagtttggtttggagtagttggatgtagagggtttgattatagatataggttgtaagttagagaggtttttttatttttatttttattatgtgattagttgttaaagaggtgtgtggaaattgggagggtggggtgaatgttggatgttttgggtatgtgattgttatttatgtgttgaggggtggataggaggtgttttgattgggaggaggg

SEQ ID NO: 277 - DNA, 7369 bp, Artificial Sequence
  chemically treated genomic DNA (Homo sapiens)
tagaagtttttttttagagtgtgtttgggtatatatttaagtgtatggttgtaaatttttttttttaaagtattgaatagtattagatatttagtaggtatttaagaaatattgaatgttgtggtggtggtgagttagaagttataaaaaaaatttttttttaaaaataataataaaaagaattattttattgtgaagtttagtattataaaaatttaaataatttattataagtttttattaaaaaaaattttttttttaaagtaaatagatagataatgtttagtttatttgaaatgtttgaaagtagaggggttttaaggtagtgggagaaggtgtttgttttttgttggatatttgataattagttttttggatggtttggatgtataggagtgaaggtgtagatagtagtggggtttagagtggggttttgaggttgtgttgtggtttttttggggtttagttataattttggtttgattttagggtgaggtaggttaagggggtttgttattgtgtttttttatttttatttgggtttttatttttatagtagaggagaaagaagtttgttttttttgaggttagttgtgttagaggaagaagattgggtatgtttgggtagagatttttagattttgagtagtttgagatgttagtaattgtagttgttttaagtttgggttttgttttttagtgggatttttgtttagatgaataatttattttttgtaattttttaaaagtaaaattgtaaatgttttaggtatagaaaggaggtaaaggtgaagtttaggggaggttaggggtgtgaggtagatgggagtggatagatatattatttatttttgtgtttgttagaagaattagtagatatttttagaattgttttttatttatgttatttttataaattatttgtaaatgagggttatttggtatttttgttattttggagttatagaaataaaggatgataagtagagagttttgggtaggaggtaaaagttttgtgttttaattatagttatttttttgttgtatgatttgagttaggttattagatttttttgagttttagtttttttagtagtgtatatgggttatgtggggagtatttaggagatagataatttatttgttaaatttttttttttttggttaataaagttgttgtaattatagggattttttttgtttaggtgagtgtagggtgtagggagattggtttaatgtttaatttttttgtttttttggagattaggttgtttttttttggtagtttttttaatttttttttttttggaagtatgtgataattaataattttgtatatttaagtttagtggattttaatttttttatttgtgaaataaatgggattgaaaaattattttggttttaagatgttttgttggggtgtttaggtgttttaggtgtttttgggagaggtgatttagtgagggattagtgggaatagaggtgatattgtggggtttttttggaaattgtagagaggtgtattgtttttataatttatgaatttttatgtattaatgttatttttttgatttttttagttgtattgggtaaatttttgtttgttagagtgggttagtggtgagttagaaagggggtttattttaatagtgttgtgtttttttggagagtgttaatttattttttaagtaaaaaaagttagatttgtggtttattttgtggggaaatgtgtttagtgtattaatgtaggtgagggattgggggaggagggaagtgtttttttgtagtatgtgaggttttgggattggttggtttgttggaatttggttaggtttagttggtttggtgttgggtagttaggagtttgggttttggggagggtggttttgggtggtgtggtgggttgagtgtgggttttgtttttttgaggtgggtttgggtggggtggttgtatattagggttgtgttgagttgtgttagttgaggtgtgagtagttgttgaagttagttttttgtggagttggagttgggtgtggatttgttgaggtattgaggtatttagaggaggtgagagagtggtggtagataataggggattttgggttggtggtttagagttgagttaagtgtgtttgtgtgtgtttttgtgtgtttgtgaggatgtgtgtttgtgggtgtgtgttgtgtttataggtgtttttgtggtaggtgaatgatgggtgtgggttggtgtgtgtttggtttgtgtatatggtgtttttaagtgtgtgggtgatgagagttgggatgtgttggagattttggggtggagagtgggattataagtataggaatttttggttatgttttttgtttttggaaatttagttggggtgagggagggtgtggatgggattgttttgggagtttgtttttggttgtggttggttttaggttttaggtgtagtttgtttgtggtgtggggatgaagtttgtgtttttggaggggtttaggaagggtgaggaaagtggagtggagtaagtttgtttaggattggttttgggtggttttgggatttaatttgtgttgttttggtttaggttttaggtttaggttttttatgttattgtgtttattatttggttgagtgttgaggttagtgtgggttgttttttggtttttgggaatgtgttaggatttgttttttaaggattagtgaggaggtgatttattgtgataaggagattttagggaatggattgtatgaggttagaattttgtttgggatggggtatagtgggattttagaagtttttttttttgtttttttgtggtttttgtttttttattggtatagtgatttatttggttggaatagtttgtttttaaggaagttgggtattggaggtttgggatattgtgttgggtttttgttttgtggtgtgttgtaggggttggggagttatggttttgttttgggtgggttttaattagtttgttagttggggaagggtaagggttttttttattttttttttattgtggttgggagaattgtggtttagtttgtttttgggttggggtgttggattttggggtgggagtggagtttatgtttggatgggaggtggggagggtttatgtttttgaggggtggggggtttggggggtatgatgttgtttagggtttttattagttgttttgggggtttagggttttttgatttagtttagattttttttttgaaagttatagggttgagtggagtaggggggtgagttgttttttggggtgttgttgtttggtgtggattatagtgtgttttttttgttttaaatttttgggggatatttgtgttttttttgtgaggaaaagtattttggagttgggttaggaatttggggtgtttaggtagttttttttttttttgtttttttttatgttgtgtttttgggaggatttgtgagtggttttgtttttgttgtttttgtttatttttattttttagggatttgatttattttgtgttttgggtgtggagataaggtggaggggttggtttttggtgtgtgtgtgtgtgtgtgtttgtgtgggtgtgtgtgtgtgtgtgtgtgtgtgtgtgtgtgtgtgtgtttgtgttagagatggtataagagtgtgtggttttttaatagtggtgggagttttggaagtttggttggtttagtgtgatgtgtttgtggttttttggtttttttttattttttttttttttattttagggtgatgtgtagttggagtggaagtagttttggtgggtgagtagtgttttgtaggaaattgatttattattattttttttagtggtttgaggttttgtttatgtattttttattttgtgtgtgattttttggaggttggtgtttttttttggttttggtgggaatagtatataggtttttttgtggagtggggttggttggtgtgaattgttgtggttatttttgggtttatttgagattaatttttatgttattattatttttttaaaggagtattttttaggtttaatagtatttattgagtttttattggaaattaaaatatggttgaagtttaaggtaggaaggttaataaaggaggttatttttaattgtttttaaaataagggtttgtgtttttgagttttttttgggttgaaagttattatgagtatgagagtagattttgatgggggaggagaggtttatgagagttataagagaaggaggggtggtagaagaggagagggtgtttgtttagattttagttttgttttgaatttttgagagttagggaatatttagtattttgatgaagttttaggtgggtgttttttttttgtgtttatgatgtattgagatttagaatgtttattttaaatatattagtgtgtttttgtttggttggtaatttaagagtgtttatttgaggaattgtgttaaatatttgtttgaatttttaatttggattaagttggttttgggaggtagggttttagtaatttatattttgaaaaaattttttaggtgttttttttttttttttttttttttttttttttttttttttttttttttttttttttttttttttttttttttttttttttttttttttttttttttttttttttttttttttttttttttttttttttttttttttttttttttttttttttttttttttttttttttttttttttttttttttttttttttttttgatagagttgtattttgttatttaggttggagtgtaatggtattattttggatttaagtagtttttttgttttagttttttaagtaattgggattataggtgtgatttttttgtttttatgtttagatttttttttttttttttttttttttgagatgtggttttgttttgttatttaggttggagtgtagtggtgtgattttggtttattgtaagttttgttttttgggtttatgttatttttttgttttagttttttgagtagttgggattataggtgttgttattatgtttggttaatttttttttgtatttttagtagagatggggttttattgtgttagttaggatggttttaattttttgattttgtgttttgttttttttggttttttaaagtgttgggattataggtgtgagatattgtatttaattatttagttaatttttatttatttttatttttagtagagatagggttttagttagttgtttaggttagttttggatttttgggtttaaatgatttttttatttttgttttttagagtattaggattataggtataagttattgtttttggtttttttaagtgattgtgatgggtttttttggttaagaaattttaaaattagagagggagtggggtttaatattatagtataggatttagggtaaataggtttgggtttagattttggttgtgttatttatgaattgtgtgatgttaggtaagttatttaatttatttgagttttggttgttttttttgtaaaaagggagttaatagatatttattttttaggaggattgatatttttaaattgtttagaatagtttttaaatataaaaatatataaataaattttaatttatgtttagtagagggtggatagaggttatttgagggttttgtttattgtattgggtgatttttttatggggtagtggtttttggtttttttagttgtatgatttaggggtaagttttatattttttttattttttgttttttaaatttggtgtgaagttattaagagtttttttttttaattagttgggatgtgaaattgtgggttttattgattataagtagtggggtgaggtggggtggagtagatgtggtatgtgttttgggttttttgttttatgaggatttagtagagtttttatttttagaaattgtaagttgggatttgtttttaggaaaatttagttgttgttaaggttgtgtagttatttagttttggagttaagttagagtaggtaggtaggtgttagggtttttttatgggtaaatttattttttgtttttttttttttgaagggggaggagaggagttaggtagattagttatttttaattttttttttgtttgtaaaatggtttttttggatataggtaatatgaggtaggggttgttaggtgtttagattttagattatttgatgtgtttggtaggatgtggtttagtttgggagaaattattttttgtgttgttttgtttggtttttttttatttttaggttatttgtttgatgatatttttgggaaaggtttttagtttatagtatttgttagttgttgtttgaaggaggtagttggtagggggaagtgataggggggaggtttagtaaaattgaaggtagagaggaataattatatttttgtttttaatgtatttttttatatgaagtgttgttggtatgttatttatattaatttagttaatttttatgtttattttttgagatagttattattattatttttattttatagatgaggaaattagagtttagataagttaagttgtttgtttagggttatttagtaaaatttggattttagtttaggtgatttggttttagagtttttttgtttaattattaggatatagttttttatttagttttgttttgtttgttttgttgtatggattttgtgattaattttttgagtatgtgtttgtagttatgttttttaaatttgtatatggttttatttatggatgaggaaattgagatttagagatattaagtggttttttaaagtttatgtagtaattggtagagttaggattataatttgggtgttttttgttttaaagttttgggtatttttatttggtagagtagggttattttatttggggatttgggttgggggatttaggaggttggaggaattgttagattgtttttttttttgggaattgattttttggttagggttgtgattaggaaattgttggattttggtaatttatatatatttggggggtatttatatttatgagggatatttttggggggaaaataaattgattttagttgataatatttggtggtaaataggattttggtttttgtttttgtaatagatttgtttttgttgatattagtttgttttttagttgtttgtttttttagtgattttggtgtgttaggttggttgagttttgttggtgggggttaggttttttgtgggaaggaagtaggaagattagttggaaggagtgagagagattttttggtaggaagatgttatttgaggtgatatagtaaagtttggttaggtaatatagtgtttaatttttgttgtgattagggttttttttgtatttttgttgtagg

SEQ ID NO: 278 - DNA, 7369 bp, Artificial Sequence
  chemically treated genomic DNA (Homo sapiens)
tttgtagtagagatataaggaaggttttggttatggtggagattagatattatgttatttggttgggttttgttgtgttattttaggtgatgtttttttattagagggttttttttattttttttagttggtttttttgttttttttttataggaggtttgatttttattagtagagtttagttagtttggtatattaaggttattgggagagtaggtaattgaagggtaagttaatgttaataaaggtaagtttattgtaagagtaaggattagggttttgtttgttattaggtattattagttaaaattaatttgttttttttttagaggtgttttttatgggtgtgaatgttttttaaatatgtgtgaattgttagagtttagtagttttttaattgtagttttggttagaaggttaatttttaaaagaagaaatagtttgatagtttttttagttttttaagttttttgatttagatttttaagtagggtaattttgttttgttaagtaaaagtatttgggattttggggtaaaaagtatttgggttgtggttttagttttgttagttattatgtaagttttaaaaagttatttaatgtttttaggttttagtttttttatttataaatggggttatgtataagtttaaagagtatggttatagatatatatttaagaaattgattatagagtttatgtagtaaggtagatagaatagagttgaatgaaaggttgtattttggtggttaagtaggagggttttggagttagattatttgggttggagtttaggttttattaggtgattttgggtaagtaatttaatttgtttgagttttagtttttttatttataaaatggggatagtaatagtgattgttttagaggatagatatgagaattaattgagttaatgtaggtaatgtgttagtagtattttgtatagagaagtgtattgaaaatagaagtatgattatttttttttgtttttagttttattgagttttttttttattatttttttttgttaattattttttttagatagtagttgataggtgttgtaggttgagggttttttttaaggatgttgttaggtgggtggtttaggggtaaggaggggttgggtggggtagtgtaagggatgattttttttaggttgagttatattttgttaggtatattaggtgatttgaagtttagatatttggtagtttttgttttgtgttgtttgtgtttaaggaaattgttttgtaggtaaaaagaaaattaaaggtggttggtttatttggttttttttttttttttttaggagagggaaaatggagagtgagtttgtttatgagggagttttggtatttatttgtttgttttggtttgattttagggttgagtgattgtatgattttggtagtaattggatttttttagggataagttttaatttgtagtttttgggggtgaaagttttgttgagtttttatgaggtaggaagtttgggatatatgttatatttgttttattttattttattttattgtttgtgattagtggagtttatagttttatgttttagttggttgggagaggaggtttttggtaattttatattaagtttaaagggtaggagatggaagagatatgagatttgtttttgagttatatagttaaaaaggttaaaggttattgttttataaaggggttatttagtatagtggatagagtttttaaataatttttatttattttttgttaggtatgagttgggatttatttatatatttttatgtttgggggttgttttaagtagtttaaaaatattaatttttttaaaaagtggatatttattagttttttttttatagaagaggtaattaaggtttagataagttaagtaatttgtttaatattatatagtttataagtggtatagttaggatttgaatttaggtttgtttgttttgagttttgtgttgtagtattgaattttattttttttttaattttgaggttttttaattagagaggtttattataattatttggggaggttaggggtagtggtttatgtttgtaattttaatattttgggaggtagaggtgggagaattatttgagtttaagggtttaagattagtttgggtaattagttgagattttgtttttattaaaaataaaaataaataaaaattagttgggtggttgggtgtagtgttttatatttgtaattttagtattttgggaggttgaggagggtggagtatgaggttaggagattgagattattttggttaatatggtgaaattttgtttttattaaaaatataaaaaaaaattagttgggtatgatggtagtatttgtagttttagttatttgggaggttgaggtaggagaatggtgtgaatttgggaggtggagtttgtagtgagttgagattatgttattgtattttagtttgggtgatagagtgagattgtattttaaaaaaaaaaaaaaaaaaaaaaaaatttgggtatgggggtggggggattatgtttgtggttttggttatttgggaggttgaaataggaggattatttgagtttaggatggtgttattgtattttagtttgggtgatagagtgtaattttgttgaaagaaaagaaagaaagagagaaagagaaagaaagagagaaagagaaaggaagaaagaaagaaagaaagaaagaaagaaagaaagaaagaaagaaaagaaagaaaaagaaagaaagaaagaaaaagaaagaaagaaagaaagaaagaaagaaagaaagaaagaaagaaagaaagaaaaaaagaaagaaagaaaagtatttagggagtttttttaaaatatagattgttgaggttttgttttttgagattaatttaatttagattgaagatttaagtaagtgtttggtataattttttagatgggtatttttgggttgttagttaagtggagatatattggtatgtttgaaatggatattttgggttttaatatattataggtataaggaggaggtgtttgtttagggttttattaaggtgttggatattttttggtttttgggagtttaagataggattaggatttaggtaggtattttttttttttttattattttttttttttttatggtttttataggtttttttttttttattaaaatttgtttttatgtttataataatttttagtttaaagaaaatttagaaatgtaaatttttgttttagaaataattaaaaatagttttttttattggtttttttgttttagattttagttatattttaatttttagtaagagtttagtgaatattgttgaatttaaggagtgtttttttgaaggggtggtaatggtataggggttgattttggatgagtttaggagtagttgtggtggtttgtgttggttagttttattttgtgggaaagtttgtgtgttatttttgttagggttgggagggggtgttggtttttaggaaattatgtgtggagtgggaggtgtgtgggtagagttttggattgttggagggagtagtgatgagttagttttttgtaaggtgttgtttgtttgttaaaattgtttttattttggttgtgtgttattttggggtggggagggggagaatgggaggggattggggggttgtgaatatgttatgttgagttggttaggtttttgaaatttttgttgttgttgggaaattgtgtgtttttgtgttgtttttgatatagatatatatatatatatatatatatatatatatatatatgtttgtgtagatatgtatgtgtgtgtgtgttgggagttggtttttttattttatttttatgtttaaagtatgggatgagttagatttttggaaaataaaaatagatgggagtaatgaaaataaaattgtttgtaagtttttttagaaatgtgatgtggagggaggtaaggagaggggaagttgtttgggtgttttaagtttttaatttagttttaagatgtttttttttatgaagagggtgtaagtgttttttaggggtttgggatggagaggatgtgttgtggtttgtgttaggtggtggtgttttagggggtgatttgtttttttgttttgtttagttttgtagtttttggagagggaatttgggttaggttgggaagttttgagtttttgaggtagttgatagaggttttgagtagtgttgtgttttttagattttttattttttaaagatatgaattttttttgttttttatttaggtgtgggttttgtttttgttttggagtttagtgttttgatttgaggataggttgggttgtgatttttttggttgtggtgggaaagaggtagaggagatttttgtttttttttgattgataggttggttagagtttgtttagagtagggttgtgattttttgatttttatagtgtgttgtggagtggggatttgatgtggtgttttggatttttagtgtttggtttttttgggaataaattgttttagttaaataggttattgtgttgatgggaggatggagattgtgaaggggtaggggagagggtttttggagttttgttgtattttattttgggtggggttttgattttatatagtttgttttttggggtttttttgttatagtgagttatttttttgttagtttttaggggatgggttttggtatatttttaagggttaggaaatagtttgtgttgattttagtgtttagttaggtggtggatatagtggtgtaaaggatttgaatttgggatttgggttagggtggtgtagattggattttagagttatttgggattgattttagatgaatttattttattttgttttttttgttttttttgggtttttttagggatatggattttatttttatgttgtgagtaaattgtgtttggggtttggagttaattgtagttaaaggtgagtttttagaatggttttgtttatgtttttttttgttttagttgggtttttaggggtggggagtgtgattagggatttttgtatttgtaattttgttttttgttttggggtttttggtatattttgatttttgttatttgtgtatttagagatattgtgtgtgtaagttgagtgtgtattgatttatgtttgttatttatttgttgtagaaatatttgtgaatgtagtatatatttgtgaatatgtatttttgtggatatgtagggatatatgtgggtatgtttggtttggttttgggttgttggtttggggttttttgttgtttgttgttgtttttttattttttttgagtgttttggtgttttggtgaatttgtgtttagttttggttttataaggaattgattttggtagttgtttatattttagttggtgtagtttagtgtggttttgatatataattgttttgtttgggtttgttttaaggaggtgggatttgtgtttggtttattgtgttgtttgggattgttttttttggggtttaggtttttggttgtttagtgttgagttagttgagtttggttgagttttagtaggttagttggttttggaattttgtgtgttgtaggagggtatttttttttttttttagttttttgtttgtgttggtgtgttggatatatttttttatgaagtgagttataaatttggttttttttatttggagaatgagttggtattttttaggaggatatagtattgttagaatgagttttttttttggtttattgttgatttattttggtaggtaaggatttatttaatgtagttgaaaagattaggaggatgatattaatatataaaaatttataaattataaaaatgatgtatttttttgtaatttttagaaaagttttataatattatttttatttttattgattttttattaggttattttttttagaagtatttggagtatttagatattttaataaagtattttgaggttagaatgattttttagttttgtttattttatagatgaggaaattgaggtttattgaatttaagtatataaagttgttgattgttatatgtttttgggaaggagggaattggagagattattaaaaaagggtaatttgatttttagggaaatagaagaattggatattgaattaatttttttatattttatatttatttgaatagaagaaatttttgtggttgtagtagttttgttggttaggaaggggaggatttgatgagtgagttgtttgttttttgaatattttttatatagtttgtatatattgttggggaaattggggtttagagaagtttggtgatttaatttagattatgtagtaaagaaatgattatagttggaatataggatttttgttttttgtttggggttttttgtttgttattttttatttttgtggttttaaaatgataaaaatgttaaataatttttatttgtagatggtttatggagatgatataaataaaggataattttggaagtgtttattggtttttttgatagatatagaaatgagtgatgtgtttatttgtttttatttattttatatttttgattttttttggattttatttttgttttttttttgtgtttgaaatatttgtagttttgtttttaaaaaattgtagaggatggattgtttatttgaatagaaattttattaaaaaatagaatttaggtttggagtagttataattattgatattttaggttgtttagagtttggaaatttttgtttagatatgtttagttttttttttttaatgtagttgattttggggaggataggttttttttttttttgttgtggggatgggagtttaggtaggggtgggaggatatagtagtagatttttttggtttgttttgttttggagttaggttaggattgtggttaaattttagaaaggttatggtatagttttaggattttattttaagttttattgttgtttgtatttttgtttttatatatttaaattatttaaagggttggttgttaaatgtttagtagaggataggtatttttttttattgttttgaagtttttttgtttttaggtattttaaatagattagatattgtttgtttgtttattttggggagaaaattttttttaataaaggtttgtaatgaattatttaaatttttgtggtattgagttttataatgaaataattttttttgttgttgtttttgggaaagaattttttttataatttttagtttattattattatgatatttaatattttttaagtatttattaagtgtttagtattatttagtgttttaaaaaaaaaagtttgtaattatgtatttgaatgtgtatttagatatattttaagggaggatttttg

SEQ ID NO: 279 - DNA, 3486 bp, Artificial Sequence
  chemically treated genomic DNA (Homo sapiens)
aattaaagaggatgagattttttgtttgattttaggtgaatttttttttgttagttaggtaggaagttttgatttgaaaattagttttgggtattgttttttttattgttttttgggtattaatttttgttttttaattttagttgaattagtggatggtgatattataggtttaagatagttgtatttaaatattagtgattataggttatattaaggaaatatttgtaggtaatttagggtttgggaaggagttatttttagttatttgtaagatagtaggatttgtagattatagtataattaaatttagataaaattttgaattagtgagaattattaggaaggaaaggaatagaaaatgaattaatttgagtgttaggagatttgtatttagttttgattttggtattaattgaatgtatgtttttggataggaaatttttttgagttttgattttttttgtggtaaaaaggagagggttaaattatagggttttgagggttttttttagttgttatattttggagtgtatgagatgaggtaggtatataaagtggataagatgtggttaagaaaataagttatatattaagtttatttgtagtataggtgtttaagaaaattttgttgttgtgtaatattagaatggaaggttggtttttagtaaaatgtattaattttggtttaaattaagatgatgggtattgggtatgggggtggggaggtagttgaagatttattgagttttgttttagggtagttttgtttattgttttattttattttttattatggtgtttaagtttatattgagagagaaatttttagttgtaaaagggagaagagaaatgttggaatattagtattggatgttaggatatggttgtggtgttttaaaaattattttattatttggagtttgattttgaggggagtatttttattttttagttttttgaaagtatttattagtatttgaatattgttttgagtttgttggagtagtgaaatttggtgagagagaagggtggaggaaggaaggagttgttgtatttggtggttggatttaggtagaggaaattgttataattttgggaaagaatagaaaagtagaaagggatgagtttttatatgtagttaatgtttatggttttaattgtgtttgggaaggaagattttgggttaggggtgtatttttgttttttaaaattaaatgtgtttgagatagttataaagtttattaagggatttgagagattagagttttttgttttttttttttaattttgagttttttttttatttttattgagggagagtttgagtttatgataagtgttgtgtttatttttggttaatttttaaaagaaagatgtttgttttggttttttttttaggtttttagtttttttagggatggtagaaatttttgggttaaggttgagtgaattattgtttattgtttttattagtttttagtaaaggtatgttggtgggggggtgtttagtttttttagtaaatgttttgtggttttttttgtagattatgaggtgggggttgttggggagggttgagttgggggtagtttgttattttggtttttagtgagttgttggtgatttttgtggttttttggtttaggttttggttttttgggtgaggagtgggagggaggttggggtttaggtgttgtggtgaatttgttaatgtagtgttgggttttgaattttaggttttgttttaggtttttggttgtttggttagtttgtttgttttaattttaatttttttgaggttagttagagtaggtttgttggtagtagtatttttttagtagttatgtgattagttaattttttggtggtgtttggggaggtggtgtgtttgggaatgaggggaggtggtggaattgtgttggggttattttaaggttgtgtttgttagttttggtggggtggtttttgttgttgtaattaatggatttttttttttgtttaaatagatttgttgtgttaattatttttttttttgttagttttttttttattgttatattgggttattaaaaaaagggggtttgtttttttggggtgttttttttttttttttttgtttttgtttgtttatggttttgtgattttgatgttggtaaggtttggagagtggttgggtttgtgggatttgtgggtttgtatttgtttagatttggatgggttttgttattttttttgtttgtttggtttttttttttttttgtttttttgtttgttagtttatttgattagtggagatttggtggttgggttggggtttttttgtagtttttgtgtgtttttagagtttgggttgtggtttgttggggtttgtgttttttggttttgagggtagttgttgggtttttgagaggggtttgggttgtgtaggggtgttttgttttgtttggttttgtttttttgagagtgtgagagaggtggttgtgtagatttgggagaaagatgttaaatgtgtgagtgtttaatgggagttttagtttggagtggatggatgttaggtaggtggagtattttaagtttttggtttgtaggaatttttttggtttggtggattatgaagagttaatttgggatttggagaagtattgtagagatatggaagaggtgagttagtgtaagtggaattttgatttttagaattataaatttttagagggtaagtatgagtggtaagaggtggagaagggtagtttgtttgagttttattatagatttttgtggttttttaaaggtgtttgtaaggtgttggtgtaggagagttaggatgttagtgggagttgtttggtggtgtttttaattggggttttggttaattttgaggatatgtatttggtggatttaaagattgatttgttggatagttagatggggttagtggagtaatgtgtaggaataaggaagtgatttgtaattgatggtaatgatttttttttaattatagaatgtgtttggggttttgttttgtttgttggagggtgttaattttagtttgttttttggtgtattttgatttagttttgggagagttaattttattggttttaggtgtttagtgttatttggtttattgtttgtttgtttgtgatttttaagttagaaattggagatggtaagatttgataatttttttaatttaatatattgtggttttttttattagtaatttttaggtatgtgataaagttgggatgtttattaatggtttgttttttggttagggaaagagttttggggtggagaatgtattttttgttttttgaaaataattttattttgtgtttttaaaagttattggggatgatggatttaggattgtgggtggaggtagtgggttttttattttttgattatggggttaatttttgttagttattgttttttttaataaagattgtgtgttttttttaaaaattttttttgtgtttaga

SEQ ID NO: 280 - DNA, 3486 bp, Artificial Sequence
  chemically treated genomic DNA (Homo sapiens)
tttaagtgtaggggaaatttttaaaaagaatatataatttttattagaaaaaataatggttggtagaagttggttttatagttaggggatgaaaaatttattatttttatttataattttggatttgttatttttagtggtttttaagggtataaaatgaggttgtttttaaaaaatagaaagtgtattttttgttttagagttttttttttagttaggaggtggattgttgataaatattttaattttgttatatatttaggagttgttagtgagagggattgtgatgtattaagttagggaaattattggattttattatttttagtttttgatttaaaagttataaatagataagtagtgggttaggtagtattgaatatttaagattaataaagttagtttttttaaagttaaattagaatatgttgaaaagtaagttaaggttaatattttttagtaggtaaagtggggttttaaatatattttatggttgggaaagggttattattgttggttgtaggttgtttttttatttttgtgtattgttttgttaattttgtttggttgtttgatggattagtttttgggtttattaaatgtgtgtttttagagttagttggagttttaattaaaggtgttgttgggtggtttttgttgatattttggtttttttgtgttggtattttgtaggtatttttggggggttgtgggggtttgtagtagaatttgggtaagttgtttttttttattttttgttatttgtatttgttttttaggggtttgtgattttgaaaattgaaattttatttgtgttggtttgttttttttatgtttttgtagtgtttttttaagttttgggttaattttttgtggtttattgggttgaagaggtttttgtaggttgagggtttggggtgttttgtttgtttggtgtttatttgttttaggttagggtttttgttagatatttgtatgtttgatattttttttttgggtttgtatgattgttttttttgtatttttaaaaaaataaaattgaataaaataaagtgtttttatgtagtttgaattttttttggaagtttagtgattgtttttggagttaaaagatatagattttgatgagttatggtttgagttttaggagtgtgtaggggttgtggggaagttttggtttggttgttgagtttttgttgattaaatggattggtgagtgggagggtggagaggagaggggattaggtaagtggagagggtggtaaagtttgtttgagtttgggtgggtgtaagtttgtgggttttgtgaatttagttgttttttaaattttgttggtgttggagttgtagagttgtgagtaagtggggataggggagggggagaaaaatattttgaaaagatgagttttttttttttagtggtttaatatggtggtggaagggaggttgatgaagaagaaaatgattgatatggtgagtttatttaaatagaggaggagatttattggttgtggtggtgggagttgttttgttgaggttggtgagtgtggttttaaggtggttttggtgtggttttgttatttttttttgtttttgagtgtgttgtttttttgagtgttgttgggagattggttggttgtgtgattgttggaggggtattgttgttaataaatttgttttggttggttttggagaaattaaaattaagataaataaattagttaaatggttgggaatttggggtggggtttgaggtttggggtttggtgttgtgttggtgggtttgttgtggtgtttaagttttgattttttttttgttttttgtttgggaagttgggatttggattagaggattgtgaaggttgttggtagtttgttaggagttggggtggtgagttgtttttagtttggttttttttagtggtttttattttgtggtttgtgggggaggttgtggagtgtttgttgggggggttgggtgtttttttgttggtgtgtttttgttgggggttggtggaggtagtgggtaatggtttgtttagttttaatttagaagtttttgttatttttggggaggttgggggtttagggaagaagttaaagtgaatgttttttttttagaaattagttaggagtagatgtggtatttattatgaatttaagtttttttttaatgaaaataagaaaggaatttaagattaaaaaaaaaaaataaaaaattttagttttttaagttttttaataaattttgtagttgttttagatatgtttagttttgaaaaatgagggtatatttttggtttaggatttttttttttaagtatagttaaggttatggatattggttgtgtgtgggaatttgtttttttttatttttttgtttttttttgggattgtagtagttttttttatttgagtttagttgttaaatataatagtttttttttttttttattttttttttttattagattttattgttttaataaatttagaataatatttagatgttagtgaatgtttttagagggttgaagggtgaaaatattttttttggggttaaattttagatgatgaaatgatttttaaaatattataattatgttttaatgtttgatattagtattttagtgtttttttttttttttttgtagttggaaattttttttttagtgtgggtttgagtattgtggtggaaggtaaagtaggatgatgagtagggttgttttgagataaagtttagtggatttttaattgtttttttatttttatgtttggtatttattattttggtttgagttaaagttaatgtattttattggaaattaattttttgttttaatattatatagtagtaaagtttttttaagtatttatgttatagatgagtttgatgtgtagtttgtttttttagttatattttgtttattttgtgtgtttattttattttatatgttttagaatgtgatagttggaagggatttttgggattttgtggtttaatttttttttttttattatggaggaaattgagatttagagaggttttttgtttagggatatgtatttggttggtattggagttaggattagatgtaagttttttaatatttaggttggtttattttttgttttttttttttttaatggtttttattggtttagggttttgtttgagtttgattgtgttgtagtttgtaggttttgttgttttataagtgattgaaaatggtttttttttaggttttgggttgtttgtagatgtttttttgatgtggtttgtggttattgatatttaaatgtagttgttttgagtttgtggtattattatttattagtttaattaaaattgaaggataggggttgatatttagagaatagtaaagggggtagtgtttagaattagtttttaagttaggattttttatttaattgatagaaaagaatttatttaggattaagtaagaggttttattttttttagtt

SEQ ID NO: 281 - DNA, 2401 bp, Artificial Sequence
  chemically treated genomic DNA (Homo sapiens)
ttattaaagaaaaaaaagatgatttattagatagttgttaaggtatttatataaaattatatgatagtaggatagatggtaattaagagggaatttaggatttgttattattagttggaaatatttgatttttagtttgtaaatgtgataagttagattaatattagtaggatattgaatatagtttgtagggatgagtttttgtgttatttttggatatgtgtttaagtaattagaataatttaaaatgttattaggtttttgttgttatttttataaattttgaatagtgagttgggtttttaaggaatttgtttttgttagtttattttatgttgtataataaataggtttaaagtttttggtagtgtatattaagtatggaggattttttatttattatgatagtttttttgttggagggttggggttgtattttatttttttttttggaaggggtggtttttgtttgaggttttatttgttttatagtagagggatgaaatggtaggattttggttttgatgggttttatttggtaatggtatatgttaagtgggttatgttttattgtttagagtaagttatatggttatgtttgatattgatgtgtgggaaatgtagaatttttttgtatttggggaggtagatatttggataatatgtaatttattatagggttagttggatgaagaatggttaagggtttaggttttttattttgagttaggttgaattagttggggttgtgagattaagttatggttattagtgtttgtttggaattatgttttgtttttgttgtgtttatattgtagtagggtttttgttttttaatttatttgaaattggtggtgggtgtggtatatagatgagaaataggaattttttatgttgggttttaataggagttgtggtgggaatataaatggtgtagttattttggaagatagtttggtggttttttataaaattaaatgtattttttatatatgatttgttatatattatttagtaattgtattttttggtatttgtttagatgagttaaaaatttgtatttatataaaaatttgtatgtggatgttgatagtagttttatttataattgtttaaatttggaagtttttaggaggtgagtgggtaaataaattgtggtgtttttggttagtggaatattatttagtgttaaaaagaaatgagtttaagttatggaaagatatgaaagaattttaagtattattaagttaaagaagttaatttgaaaaggttgatgttgtatgagtttatatttatgatattatagaaaaggtaaaattataaagatagtaaaaggattagtggttgtaggagttagggaggagggagggatgaataggtggggtatagaggatttttagggtagtgaaattattttgtatgatattgtaatggtggatataggatagtaagtatttgttttttattttgtagaatgtatggtattgagaatggatttttttgtaatatatggatttttagttataatattgaattttttttggggttttgtattgtttgtagtgttttttaatttttgtttttgttttgtttattgttttttttttttgttatagtgtgtttgttttgtggttgttaattagttgtgtgttttggttgtgtgttttgttttgtttttggtgggtgtgtgtgtggttaatgggtggtgtgtgggggttgggttgtggtggggtggggtagtggggtggttgttaattgttgtggtgttgttgaaattgaaaatattatattatgttaattgtggttgggtttgtgtgtatgggggtggggtttgtgtgtataaagggggtgtaggtgggttgggtgttttataggttaagtgtgttgtgtttgaggggtgttggttaggtttgagtgagtgagttagttagtaggtattgagggggtgtggttgttgtttggatgagataggtgaatttgatgtagaagagtttattattggatagttaggtagttgttgtgttttttgtatatgtagagttgggtggtgtggggttttttttgtgtttggtttttgtttttttttttttttttttttttttttttttgttgttttttttttttttgttgtttgtgtttgtgtagttttgggttatgtttgatgtgtttttttgtagtatatttatgatggagtgttttgttgtttgtgggatttttttagtattagtgtgtattagtgtttgttgtagtttttttgggttggtggattatgaggagttgagttgtgagttgtaggtttgtttggttgagttgaatgttgaggattagaattgttgggattatgatttttagtaggatatgttgttgtggggttttggatgtttgtagtggattgaagtgg

SEQ ID NO: 282 - DNA, 2401 bp, Artificial Sequence
  chemically treated genomic DNA (Homo sapiens)
ttattttggtttattgtaggtgtttagggttttgtagtggtatgttttgttggaagttgtaattttagtggttttggtttttggtgtttagtttggttaggtgggtttgtagtttgtggtttagttttttgtggtttattggtttgaagaggttgtggtaggtgttggtgtgtattagtattgggaaggttttatgggtgataagatgttttattgtggatgtgttgtggagggatgtgttggatatggtttggggttgtgtaaatgtgggtagtgagagaggagaggatagtgagaagaaggggaaaggagaggaggagagggtggaggttgggtgtaagggagattttgtgttgtttgattttgtgtgtgtgagggatgtggtggttatttggttgtttggtggtggatttttttgtgttgggtttgtttgttttgtttggatggtagttgtgtttttttgatgtttgttggttagtttgtttgtttaggtttggttggtattttttgagtatagtgtatttggtttgtggaatgtttagtttgtttgtgttttttttatatgtgtgggttttatttttgtgtgtgtgggtttggttgtgattagtataatgtagtatttttagttttaataatattatggtgattggtggttgttttgttgttttgttttgttgtggtttggtttttgtgtattgtttattggttgtgtgtatatttattgggggtggggtggggtgtgtggttggggtgtgtggttgattggtggttgtggggtgagtgtgttgtagtaggggaagggggtggtgagtggggtgggggtgggagttaaagggtgttgtgggtggtatggaattttgaaagggatttaatattataattgaaagtttatatgttataggagggtttgtttttagtgttgtatattttatgggataaaggataaatgtttattgttttgtgtttattattatagtattatataaggtagttttattgttttaaaaattttttgtgttttatttatttattttttttttttttttagtttttgtaattattgatttttttattgtttttgtagttttgttttttttataatgttatagatgtgaatttatatagtattagtttttttagattggtttttttgatttaataatatttaaggtttttttatgtttttttatgatttgagtttatttttttttagtattgaataatattttgttgattggaggtattatagtttgtttatttatttattttttgaaggtttttaggtttgggtaattatgaataaagttgttattaatatttatgtgtaagtttttgtgtggatgtaagtttttgatttatttgggtaaatattaaggggtataattgttggatggtgtgtggtggattatatgtgaagggtatatttagttttgtaaggagttattaaattattttttaaagtggttgtattatttgtgtttttattgtagtttttgttaaagtttagtgtggagagtttttgttttttatttgtgtattatatttattattaattttagatgaattaaaaaatagaaattttattataatgtggatatggtaaggataaggtataattttaaatgaatattgatgattgtggtttgattttatggttttggttggtttggtttggtttggggtgaagagtttgggtttttggttgttttttatttagttggttttgtaatgaattgtatgttgtttaaatatttgtttttttaaatgtaggaagattttgtattttttgtatgttaatattagatgtggttatgtaatttgttttgggtagtgaaatgtgatttatttggtatgtattattgttaaatggagtttgttaaagttagggttttgttgttttatttttttgttgtgagataaatgagattttagataggggttgttttttttaaaagagaaaatggagtataattttagttttttagtgaagggattgttgtggtgagtgagagattttttatgtttgatgtatgttgttaagagttttgggtttgtttgttatgtagtataaggtaagttgatagagataggttttttgaagatttaatttattgtttgaggtttatgggaatgatagtaagggtttggtggtattttgagttgttttggttatttggatatatgtttagaaatgatgtagagatttatttttgtaagttgtgtttagtgttttgttggtgttggtttagtttgttatatttgtaggttggaggttaggtgtttttagttggtagtgatgggttttgagtttttttttggttattatttattttgttattgtgtagttttatgtgagtgttttaataattgtttagtaagttattttttttttttttgatga

SEQ ID NO: 283 - DNA, 5660 bp, Artificial Sequence
  chemically treated genomic DNA (Homo sapiens)
aattagaatttttatttttttgtgtttgttatattttttagtgttgtttaatttttttttgtaagtgagggtggtggagggtgtttataatttttttagggagtaagttttttttggttttttttttttttttttttttttttttttttgagattaagttttgtttttgttttttaggttggagtgtaatggtgtgattttggtttattgtaatttttgtttttttttgggtttaagtgatttttttatattagtttttgagtagttgggattataggtatgtgttattaagttttgttaattttgtattttttagtagagatagggttttgttatgttggttaggtttgttttgaatttttggttttaggtgatttgtttgttttggttttttagaatgttgggattatagatgtgagttattgtatttggattttttttttatgtaatagtgataattttatttaaagtatttttttttttttttttgagttggagttttattttgttatttaggttggagggtggtggtgtgattttggtttattgtaatttttgttttttgggtttaagtgatttttttgttttagttttttgagtagttggaattatatatgtgtgttattatggttagttaatttttgtatttttagtagagatggggtgttattattttggttaagttggttttgaatttttgattttaggtgatttgtttgttttggttttttaaagtgttgggattataggtgtgagttattgtgttttgttttaaagtattttttttttatgttttaaaataagattgtaagttagtttttaaagtggataatttaagagttaataggtattagtttaggatgtgtggtattgtttttaaggtttatatgtattaatatattatttaaatttataataatttttataaagtagggggtatttatatttttttttttttttataattatgaaaaatgtaaggtatttttagtaggaaagagaaatgtgagaagtgtgaaggagataggatagtatttgaagttggtttttggattattgtgtaattttgtttttagaatattgagtattttttttggtttaggaattatgattttgagaatggagtttgtttttttaatgattttttttttatttttttatttgtttataggtagaatttttttttgtttgtattaaataaattttatttttttagagtttgtttttatattaggtaatgtatatgtttgagaaatttttgttttagatagttgttttatatgtaggaggggaaggggaggggaaggagagagtagtttgattttttaaaaggaattttttgaattagggtttttgatttagtgaattttgtgtttttgaaaattaagggttgagggggtagggggatattttttagttgtataggtgattttgatttttggtggggtttttataattaggaaagaatagttttgtttttttttatgattaaaagaagaagttatattttttttatgatattaaatattttgatttaatttggtagttaggaaggttgtattgtggaggaaggaaatggggtgggggtggatttttttttaatagagtgaatgtatttaaatatgtttttgttggtaggtgggggagtgtggttgggagtagggaggttggagggtggtgtggggggtaggtggggaggagtttagttttttttttttgttaatgttggttttggtgagggttgtttttggttggtgtttttgggggagatttaatttggggtgattttaggggtgttatatttgttaagtgtttggagttaatagtattttttttgagtatttgtttatggtgtttttttgtttggaaagatattgtggtttttttagaggatttgagggatagggttggagggggtttttttgttagtattggaggaagaaagaggaggggttggttggttattagagggtggggtggattgtgtgtgtttggtggttgtggagagggggagagtaggtagtgggtggtggggagtagtatggagttggtggtggggagtagtatggagtttttggttgattggttggttatggttgtggtttggggttgggtagaggaggtgtgggtgttgttggaggtgggggtgttgtttaatgtattgaatagttatggttggaggttgatttaggtgggtagagggtttgtagtgggagtaggggatggtgggtgattttggaggatgaagtttgtaggggaattggaattaggtagtgttttgattttttggaaaaaggggaggttttttggggagtttttagaaggggtttgtaattatagatttttttttggtgatgttttgggggtttgggaagttaaggaagaggaatgaggagttatgtgtgtatagattttttgaatgttgagaagatttgaaggggggaatatatttgtattagatggaagtatgttttttattagatataaaatttatgaatgtttgggataaaaagggagttttaaagaaatgtaagatgtgttgggattatttagtttttaatttatagatatttggatggagtttattttttttattaggagggattattagtggaaatttgtggtgtatgttggaataaatattgaatataaattttgattgaaattatttagaagtggttgggtgtggtgttttatgttttgtaatttttttattttgggagattaaggtggggggaattatttgaggttgggagtttgagattagtttggttaataggtgaaattttgtttttattaaaaatataaaaagtagttgggggtggtggtaggtgtttgtaattttagttatttgggaggttgaggtaggagaattgtttgaatttgggaggttgaggttgtagtgaatagtgagatggagttattttattttagtttgggtgatagagtgagattttgttgaaagaaagaaagagagaaagagagagagaaaaattatttagaagtaattatatattgtgtttatttttaattgagtagggtaaataaatatatgtttgttgtaggaatttaggaaataatgagttatatttatgtgattattttagaggtaatatgtagttattattttgggaatatttgttaatatttttgtttttttattatttttagtttatttgatatagtttatttgtgataagagtttttaattttttatttttgaatagaggtgttttttttttttttatttttgttttgtgagggagttaggggaggatttaaaagtaattaatatatgggtaatttagtatttttaaaattttgttaatagtttgaatttgggagtttggttttgtagttttataatattttagaagagattttatttgtttaaaaataaaaaggaaaaagaaaagtggatagttttgataatttttaatggagatgggagaagaatatgtagaaaaggggaaatgatgttggtttagaattttaattatattggtgtttaatataggaatatttatttatataatattttaaagtattaaatttatattagtatattattaaatggatatattattaaatgggtttaagtattttatatattttaatttaattgatttattttttttttgttttggatttttattatgatttaaatatttatatatgggttattttttagattttttatattatgaaatataagaaaaatttttaaggttagttttatgattaagatgaaggattttattgaatatataaaataataaatatattgtaatattttgtttttttttttgtagttgtaatttggtttgtttatattttttttttgtttttttgaaaattgagttagttttatttttttaggataggatttaataattataatataatttagtataattttttgatttaggtaaattatgtaatttgtgtttagtatgaaatgtatttaaaaataagtaatttttttttaatattattatttttaaattaatataataaataatagttattttaaaataaattgtttatttttattatgtagtatttaaattttaaggttgttatgattgtagatagtattttaaaatttttttttggaaatggttttgtttttaagatgatttaggaattaaagaggtgattattttttgtttaatgaatttttaaattataaatttgggaagtgttttagttttttattgttgttgttataaattattataaatgtgttagttaaaataaatataaaattattattttatagttttagagattagaagttaaaaatgggtttataaggttttattttttttggaaattttaaggggtaatttgtttttttgttttttttagtttttagtgattattaaattttttggtttatggtttttgtattttttttgtggtttgtgtttttatttttgtattttttttttgattgtgattttttaataaaaatatttggggttatgttgggtttattttgaaaattttggataattttttttaagattattaattaaattatatttgtaaagttttttttgttatataagttaatgtattaaaagtttttgaggattaggatatagatattgggggtgggggggtattatttagtttattataggaaggaattttagggttaattaaattagtttttttattttatatttgaagaaattgaagttttggaattggagagtattatgttaaatgaaataagttaaatatagaaagataaatattatatgtttttatttatttgtgaaatataaaataattatatttttagtagtaaagagtagaatggtggttattagagttggggggtgggaggaatggggagatggtaattaagatataaagttttagttaagatgggaggaataagtttgattgttttttttgagatgtgttttatagtatgatgaatatagttaaatagtaaattttaaatgtttttatttgataaaaatgttaaatatttgagatgatggataggttatttagtttgatttaataattttttattgtgtttaaagattataattttatattgtattatataaatatatataattgtattattttaatatataattttaaaattaatataatgaaaaagaaattgaagtttaatatttttagaagttaagtgtaatttaaaagttttgtgagaatttgttttaataaataaataagttttttttttttaataattattatattttgtgtttggatatatagtagtgaataaaaaaaaaaaaaaaaatttttaggtttaatataattttaggaagaaattttagtagttgtattttaggggaaatataggaagttagtttggagtaaaagttagtttgtttttgtttttttgttattttgtttgtgttttatagtgttttttgtttgtgatgatagttttgtagaagtttggaggatataatggaatttattgtgtattgaagaatggatagagaatttaagaaggaaattggaaattggaagtaaatgtaggggtaattagatatttggggtttgtgtgggggtttgtttggtggtgagggggttttatataagttttttttttgttatgttggtttttattttggttttgattattttgttttttttggtagg

SEQ ID NO: 284 - DNA, 5660 bp, Artificial Sequence
  chemically treated genomic DNA (Homo sapiens)
tttgttagagagaatagaatggttagagttagggtgggggttggtatgatggaaaggaagtttgtgtagagtttttttattgttaagtagatttttatataagttttaggtgtttaattatttttatatttgtttttagtttttaattttttttttgagttttttatttattttttagtatataatgaattttattatattttttgaatttttgtggagttgttgttataggtagagagtattgtgaggtatgggtaaaatagtaaaggggtagggatagattgatttttattttaggttaattttttgtattttttttgagatataattattgaaatttttttttgaaattatgttaggtttggagatttttttttttttttttgtttattgttgtatatttaagtgtagaatgtggtaattgttaaaaagagaaaatttgtttgtttgttaaaataaatttttataaaatttttaagttatatttagtttttgggaatgttgaattttaattttttttttattatattagttttaaaattatatattgggatagtatagttgtatatatttatgtggtataatatgaagttatgatttttgaatataatggggaattattaagttaagttaagtaatttatttattattttaaatatttgatatttttgttaaatgagagtatttgggatttattatttagttatatttattatgttatgaaatatattttaaaaaaaataattaaatttattttttttattttaattgaggttttatattttgattattatttttttattttttttattttttagttttagtaattattattttattttttattgttaagaatgtaattgttttatattttatagataagtgagaatatgtgatatttgtttttttgtgtttggtttattttatttagtataatgttttttaattttaaaattttaatttttttaagtataaaataagaaggttagtttaattaattttaaaatttttttttgtggtaggttgaataatgtttttttatttttaatgtttatgttttaatttttaaaaatttttaatatattaatttatgtggtaaaagaggttttgtagatgtgatttaattaatggttttgagggagattatttagaatttttagggtgggtttaatataattttaagtgtttttattagagggttatagttagagagaagatataagaatggaagtataggttatagagaaaatatagagattatgagttaaggaatttgatggttattagaagttggaaaagataaggaaatagattgttttttagagtttttaaaaggaatgaaattttgtggatttatttttgatttttgatttttagaattgtaaaataataattttgtgtttgttttagttaatatatttgtgataatttgtaatagtagtagtaggaaattaaaatattttttaggtttatgatttgagagtttattaaataagagatggttatttttttggtttttaaattattttggaaataaagttatttttagagaggaattttaaaatattgtttgtagttatagtaattttaaaatttgagtgttgtatggtggaagtagataatttattttaggataattgttatttgttatattagtttgaggatggtggtgttaaagaggagttatttatttttaggtatattttatattaaatataaattgtataatttgtttaaattaaggaattatattaaattatattatggttattaaattttgttttgagaaagtgaaattgatttagtttttaaagagataaagagaaagtataagtaaattaaattgtagttataaaaagaaagataaaatgttgtagtatatttattgttttgtgtatttaatgaagttttttgttttggttataaaattagttttaaaggttttttttatattttatagtatgaaaaatttaaaaagtaatttatatgtaaatatttaaattatgatagaaatttaaagtaaaaagaaaatgaattaattgaattaaaatgtgtaggatgtttaaatttatttgataatatatttatttgataatatattaatatgaatttagtattttaaaatgttatataaataaatgtttttatattaaatattaatgtagttaggattttaagttaatattatttttttttttttatatgttttttttttgtttttattaaaaattgttaaaattatttattttttttttttttttttgtttttaaataaataaggttttttttaagatattgtaggattataaagttaaatttttgggtttaagttgttggtaaaattttagagatgttaagttatttatgtattaattatttttaaatttttttttaatttttttataaaataggagtagggagaggagaaatatttttgtttaaaaatgaggaattgaaaatttttattataaataaattatattaagtaagttaaagatagtaaaagagtaaaaatgttagtagatatttttaaaatggtaattatatattatttttggaatgattatatgaatgtggtttattattttttaagtttttatagtaaatatatatttatttgttttatttagttaaaaataaatataatatgtagttgtttttgaataattttttttttttttttttttttttttttttttttgataaagttttattttgttatttaggttggagtgaagtggttttattttgttgtttattataattttagttttttgggtttaagtgatttttttgttttaattttttgagtagttgggattataggtgtttgttattatttttggttattttttgtatttttagtagaggtgaggttttatttgttggttaggttggttttgaatttttgattttaggtgattttttttgttttgattttttaaagtgaagggattataaggtgtgaggtattgtgtttggttgtttttgaataattttgattaaaatttatatttgatatttattttaatatatattatagatttttattgataattttttttagtaagaaagataagttttatttaggtatttgtgaattggaggttaagtagttttagtatattttatatttttttaagattttttttttattttaaatgtttgtaaattttgtatttgataaagagtatatttttatttaatataaatatgtttttttttttagatttttttagtatttgagagatttgtatgtgtgtggttttttattttttttttttggttttttaagtttttagggtgttgttaggaggaggtttgtgattataaattttttttgaaaattttttaggaagttttttttttttttggagaattgaagtgttatttgattttaatttttttgtaaattttgttttttagagttgtttgttattttttgtttttgttgtagattttttatttatttggattggtttttgattgtaattatttggtgtgttgggtagtgtttttgtttttagtagtgtttgtattttttttatttgattttgggttgtggttgtggttagttagttagttgaaggttttatgttgttttttgttgttggttttatgttgttttttgttgtttgttgtttgttttttttttttttgtagttgttgagtgtatgtggtttgttttattttttggtgattagttagttttttttttttttttttttggtgttggtggaagagttttttttgattttgttttttaaattttttggagggattgtggtatttttttaggtaaggggatgttgtgagtgagtgtttggaggaggtgttattaattttgagtatttagtgaatgtggtatttttgaagttgttttaggttgggttttttttgggggtattagttggaagtagtttttgttagagttagtgttggtaaggaaggaggattgggtttttttttatttgttttttatattgttttttggtttttttgtttttagttgtgtttttttgtttgttagtaaaggtgtgtttgagtgtgtttattttgttaaaaagaaatttgtttttgttttgttttttttttttgtgatataatttttttaattgttaaattgaattggggtgtttggtgttatagggaaagtatggtttttttttttaattataagaaaaagtaaaattatttttttttagttgtgagagttttattgagaattgaaattatttgtatgattagaaagtgtttttttatttttttaatttttgatttttaggagtgtggggtttattaagttagaaattttagtttaaaggattttttttggagagttggattgtttttttttttttttttttttttttttttgtgtgtaaaatggttgtttggggtaagggttttttagatgtgtatattgtttggtataagagtagattttgaaaagatgaggtttatttaatatggatgggggagaattttgtttgtaggtagataggaaaatggggagggagttattggaaggatggattttatttttaaagttataatttttagattagaaaaagtgtttagtgttttagaagtagagttgtatagtgatttaaagattagttttaaatattgttttgttttttttatattttttatattttttttttttattgaaaatattttgtattttttgtaattataaagggggaagggaatatgagtgttttttgttttataggggttgttgtgagtttaaatgatgtattaatatatataagttttaagaatagtgttatatattttaagttaatatttgttagtttttgaattatttgttttgaggattggtttgtaattttgttttgaggtatagaaagaaaatgttttggagtaggatgtggtggtttatatttgtaattttagtattttgggaagttgaggtgggtagattatttgaggttaggagtttgaggttagtttggttaaaatggtgatattttgtttttattaaaaatataaaaattagttggttatggtggtgtatgtgtgtaattttagttatttaggaggttgaggtaggagaattgtttgaatttgggaggtagaggttgtagtaagttgagattgtgttattattttttagtttgggtgatagaatgagattttgatttaaaaaaaaaaaaaaaaatgttttggatagaattattattattatataaaaggaaagtttggatgtggtggtttatgtttataattttagtattttgggaggttgagataggtggattatttgaggttaggagtttgagataagtttgattaatatggtgaaattttgtttttattaaaaaatataaaattagtggggtttggtggtgtatgtttgtaattttagttatttggaggttgatgtaggagaattgtttgaatttaggagaaggtggaggttgtagtgagttgagattgtgttattgtattttagtttgggagataagagtgaaatttggttttaagaaaaaaagaaagaaagaaagaaagaaagattaagaagaatttattttttgaaaagattatgggtattttttattatttttatttataaagaaaagttaaatagtattaaagagtataataagtgtaaggaggtaaaagttttaatt

SEQ ID NO: 285 - DNA, 5033 bp, Artificial Sequence
  chemically treated genomic DNA (Homo sapiens)
gaaaattaggttgagtaggttggttttttaaagaaatttattgagtttttataatgttttttttatttgatgggagaaaaggggttttggaagattaagtgtgaagttttagaattttgtttggagttggttaggattatttaggtttgagtataagtaaagtgttgtttgtggtgttagtaagtgtgaatgtttttggtaatgttttttttatttaaagttgttttttatttagttaatttgttttgtgaagtttatatatttgttttgtgtaagatttttagttattttatttagttattggttttttttttattattattttttatgttttttttaaagaaaaatattattttttatttttttattaattttaaatagtttttatttttttgatatatttattatttaagaaaatggtttaagaattgggttagattattttgttttaatttttttgataagttttagagaaatttaaaggttaaaataagagtataagagtaaaaggtagagaaattaagaaattgaagattaggaaatgggggttggatgggaaagaaaaagaaattgttattaatgttatttggtttttttttttgtttaggtggattttagttttgttgaggttttgttagtagatttttagttttaattagtatttttatggtggtggtatttttattgtttttaaaagaaagagttttttttaattttatagggatttgggggatgaggagttagagttaaggtattttaaaaaaaatatgtgaagatttttattttgtaatatataagtaattgtttttttgttaagattttgttttttttagtattttgaattaaaatgattttgtaaataaaaattgtttatttttaggagaggtttatttatgtagttttttattaaagtttttaggtaataaatttataatttgtggttttttttttatttaatgtagtatttgttgaaatgttttaaatattttaagtaataaatgttgatttaaatttatttaggaagattaggaaggggaaaaaaagtatttggtatttaaatttttagaagagaatttaatgataggtttagtttgtttaatgataagtttagtattatattttttttttatgatgttttattattattgtataaattttttttattatttatgataaataaaaataagatatttgataaagtgggtttaaataggtaagagtgtaaataaagatttattgtataaatatgatgaaattgggattttagatttttaaagtataatttttttttgttttatgtgtgttaggttgttatttttaattttgaattagttttttttttttttaagggttgtatttataatgtaaaaatggaaagaattaaaaagtatatgtaaaatatgatttttgggatttttttttatttttatggttgattaatttaaatagaaagatatatttaagagaaaattgttaagtttgatataagttatgaaatttgtgaagtttaagtattgtttggggatgaatttaatttgtatgataggtgtagagttgttgtttttagatattttaagaaatatggagttattttgaatgatttttttttggttataagggagttattaatgtttttatagtgaaattaattggttggttgaaggaatagaaattttttgttttgtttattggggattaggagttgagggtagtggtgaatatttttaaaatattagttttggttttattggatatttagtgagtagtgtagttagtatttttggtggttttttggtttagtttttggtgtatgtgttttagtatttttgggtaggtttttttgtttttgtgatgtgttggtttgggtttggttttttggtgattatagtggatagggggtggagtttaagggggtggggagatgttggttttttggtttagttgaaaatggaattttttgttggttggttttttattttgttagagtgaggtggggtagtgaggattttgtgatgtgtttgtattttgtggttagagtggttttgagtttggttgtgtttgtgttaggtgtttttttttagaagtaatttaggtgtgtttgttggtttttgagtgttaggaaaagtttggagttaatgattggttgtttggttattgtatggggttttaagttgtagaaggatgatgggagggtaatgaagttgagtttaggttttttaggaaggagagagtgtgttggagtagtgtgggaaagaagggaagagtgttgttaagtttatggttaatggtggattatttgggttgttgtgtgtttgggggttgtggaatgtgtgaggagaataagggtatgtttagtgggggtggtagtgatgagggtttggttagtgttgtggtgtggggattagtggagaaggtgtgatagtttttggaagttggtgtggattttaatggagttaattgttttgggaggtgtgtgatttaggtagttggggttttagggttttgttggtagggggtgtgtgaatgtggggtgtggttttggtggattggggttggaatttagattgttgatgtagatttgtataggagtttttgttggttggaggtgtgtattttatgtgtaaaataggtttttatttagtaaaaattttaaagagagatattgaaaaatttattgtttaagttttttttagtggtttttgttttgttattttatgattagagatgtaaggaatagattgaattggggagaaaaggagaaaaggaaagtttatttagggaagaagattattttgtttgtttgtttttaatgataaagataagtaaagtataagttatgtattttagattggatttaaggaattttataaaattatagtatatggaaaaaattaatgtaaatttttaagttattatatgaaatttgttgtattgtttttttatagaggttaattgagaatgagatgggattttttaattatagtatttagttttttttatgttagtagtgttttatgagtgatgtataagagaaaaaatatatagttttataggttttttattttttaattattatatttagtgtttagattataaaaatatttttgtagtaattgttaggttttttttgaatggtaaaggatttttataaataatgtatttttatttttattgttaaaatatatttatttaatgtttaagtatgaattttgttttaattagtattgatattttttattttttttataattttggataatttttttgtattttattgttggttagtggttatatttagtatttattttattattattttttaaaattaagttaatattaagggattttgttaatagtatagattttaaagaagtgtttattttttttgaatttttagaataatggtataataaatgagggatttttaaaggagtaaaaatattgtaaagtgtattttaaaaatttaaaattttattaataattataaaaataagttatatatgtaatttattattttttgaaatattaatagtagttatttttttttttttttttatgtaaaatatttttatattattagtagatataatttattatggtttttaagagatgaaatgaatatttttaatattaatgaaataagttaataaaatatgagaagtatattgttttttaattaaatggtatattttaaagtgtataaatttataataaataatttgattttagatatttagttattaaaaattgttttataattgattttaaatatgatagtaaatgtttttataatgtttatgtatataaatggttgttataggattatttttgtaaaatattattttttttaagttatgtattattttgattgattgttaatatttaagttttatttatttatttatttattttattttttttgagatgaggttttattttgttggataggttggagtgtagtggtataattttagtttattgtaattttttttaggatgtaagtgatttttttgttttagttttttgagttgttgggattataggtatgttttattatgtttagttaattttttattttttgtagtagagatgggattttattatgttggttaggttggttttgaatttttgattttaggtgatttgtttgttatggttttttaaagtgttgggattataggtataagttattgggtttggtttaagttttttttatatagtaaaatatttattgtttaatatttttaaattttagttattataaaattttgtagtatataaatatagttagttttatattatattaaaaatattatagtttaaatttaaaatgatgaattgttaaggaaaaattatttattataattttataagattttgtatgatttaatttattttttttttttaatttttaattttggtttaaattattatattataagttagttatgagtttagatatatgataaataaaagttttttgtatgggatttgttatgagaattaaataaattaaaaaaaaaagaaagaaaaaaatttagttgtttatttttttttttaaattattatttttaatttttaataaatagtagttgattatttaataaatatttgtagatttggattatggaggaggggttagtaaggtaaataatttaaaattttaaaagttgaataaatttaattttgtttttaaattatttaataaaatagatttttatgttttaatggaaattaagatttgtttttttataatgatgattattattttattattaatttttttgtttttgtatgtttagagaataaaatggtatttaatttgtattgagtataatttgaaggtggggtgggaaagtggattgtattagtaaatgaagaaatattagatattagagatttgaatatttttgtattgggtgaaaattttgtaattaggtgtttttttaaatggttttatttgttttgttttggttggtattttttatatttgtttttattttggttttgattattttgttttttttggtagg

SEQ ID NO: 286 - DNA, 5033 bp, Artificial Sequence
  chemically treated genomic DNA (Homo sapiens)
tttgttagagagagtagagtggttagagttagggtgggggtaggtatgggagatgttggttggggtaaggtaggtggagttatttaaagaaatatttaattgtaaagtttttatttagtgtagaggtgtttaggtttttgatgtttggtgtttttttatttgttgatgtaatttatttttttattttatttttaggttatatttagtataaattaaatgttattttattttttaaatgtgtagagataagaaagttgatggtaaagtgatgattattattatggaaaaataaattttgatttttattggaatatgggaatttattttgttaaatgatttaggggtagagttaaatttatttggtttttaaagttttaaattatttgttttgttgattttttttttataatttaggtttataaatatttattaggtagttaattattgtttgttagaagttgggagtaatggtttaggggagaaaataaataattaagttttttttttttttttttttttaatttatttagtttttatagtaaattttgtgtggaaggtttttgtttgttatgtgtttgagtttataattggtttgtagtgtgataatttgagttaaagttggagattagaagggaaaagtaaattaaattatgtaaaattttataaaattataataaatgatttttttttaatagtttattattttaaatttagattataatatttttaatgtaatataaaattaattatatttgtatattataggattttataatagttaagatttaaaaatgttaaatagtaaatattttgttatataaaaagagtttgggttaggtttagtggtttatgtttgtaattttagtattttgggaggttatagtaggtagattatttgaggttaggagtttgagattagtttggttaatatggtgaaattttgtttttattataaaaaataaaaaattagttgggtatggtggggtgtgtttgtagttttagtaatttaggaggttgaggtaggagaattgtttgtattttggaagaggttgtagtgagttgagattgtgttattgtattttagtttgtttgatagagtgaggttttattttaaaaaaaataaaataaataaataaataaatagagtttggatgttagtagttaattaggatgatgtataatttagaaaaaatgatgttttgtaggagtaattttgtagtagttatttgtgtatatgaatattatgaaaatatttgttgttatatttaaagttaattataagataatttttggtaattaaatgtttaaaattgagttatttgttatgggtttatgtattttaaaatatattatttaattgaaaggtagtatattttttatgttttgttggtttgttttattaatattagaaatgtttattttattttttaaaaattgtgataagttatatttattagtgatgtaaggatattttatatagaaaaaaaggggaaaatagttgttgttagtattttagaaaatggtgaattatatatataatttgtttttataattattaataaaattttaagtttttaagatgtattttataatatttttgtttttttaaaaattttttatttgttatattattattttaagaatttaaaagaaatgaatatttttttaaaatttatattattaataagattttttaatattagtttagttttagagggtgatagtgaggtgagtattgaatatgattattagttaatggtaaagtataaaagagttgtttgagattgtaaaagaaataaaaaatattagtattaattaaagtaggatttgtatttaaatattgaataagtgtattttaataatgaagataaagatgtattatttatgaagattttttgttatttaaaaaggatttaatagttgttgtaggaatatttttgtaatttgggtattgagtatgataattaaagaatgagaaatttatagaattatatatttttttttttatgtattatttataagatattgttaatataaaaggaattaagtattgtggttgaggaattttgttttatttttaattaatttttatgagaaaataatataatagattttatatagtagtttagaagtttatattgattttttttatgtattatgattttgtagaattttttaaatttaatttagaatgtgtaatttatattttatttatttttattgttgaaagtagatagataagataatttttttttttaaataagttttttttttttttttttttttttaatttagtttattttttgtatttttgattatgagatggtagaataaaaattattaaaaaaagtttaaatagtgggttttttaatgtttttttttaggatttttgttgggtaaaagtttgttttatgtgtggaatgtatatttttggttaatggagatttttgtataaatttatattggtgatttaggttttagttttgatttgttgaggttgtgttttgtgtttgtgtgttttttgttggtgaggttttggggttttagttatttggattgtgtgttttttgaaatggttgattttgttgggatttgtgttggtttttaggagttgttgtattttttttattagtttttgtgttgtggtgttggttagatttttattgttgttgtttttattgggtatgtttttgttttttttgtgtattttgtagtttttagatgtgtagtggtttggataatttattgttggttgtaaatttaatgatatttttttttttttttttatgttgttttggtgtatttttttttttttaggagatttgggtttagttttattatttttttgttgtttttttgtggtttggggttttgtgtagtggttgagtggttggttgttagttttgggttttttttggtgtttaagaattagtgggtgtgtttggattgtttttgggaaaaagtgtttagtgtggatgtagttgagtttaaagttgttttggttgtagggtgtggatgtgttgtggagtttttattgttttgttttgttttggtagagtggggagttagttggtaaagaattttgtttttagttgggttaaggggttggtgtttttttatttttttaggttttgttttttgtttgttgtgattgttgggaggttaggtttgggttgatgtgttatgagggtggggaagtttgtttaaagatgttaggatgtatgtgttagagattgggttagggagttgttaggaatgttggttgtattgtttgttggatgtttagtaaagttaaggttaatattttgggaatgtttattattgtttttagtttttaatttttagtaggtggagtagaggatttttgtttttttagttagttagttggttttattgtggagatgttggtggtttttttgtgattgagagaaagttatttaaaataattttgtgttttttaagatgtttgaaagtgatagttttgtatttgttatataagttaaatttatttttaggtagtatttgggttttataagttttataatttgtattaaatttagtaatttttttttggatgtgtttttttgtttgaattagttaattataaaaatagagaaaaattttgagaattatgttttgtgtgtgttttttaattttttttatttttgtattatggatataatttttaaaagagaaaaaaattagtttgagattgagagtggtaatttggtatatataagataaaaaaaaattatattttaagaatttgagattttagttttattatatttgtatagtaaatttttgtttgtatttttatttatttaaatttattttgttaggtattttatttttatttattatgagtaataaaggaaatttatgtagtaataatgaaatattataagagaggggtgtggtgttgggtttgttattaaataggttgaatttgttattaaatttttttttgaagatttaaatgttaagtgtttttttttttttttttaatttttttaggtgagtttgaattaatatttattatttaaaatatttaaaatattttagtggatgttatattggataggaagagaattgtaagttatggatttgttgtttaaaaattttggtgaggaattgtataagtggattttttttaaaagtgaataatttttgtttatagaattattttggtttggagtgttgaggaagataaagttttaataggagggtaattgtttgtgtattgtaaaatgagagtttttatatgttttttttaggatattttagttttgattttttattttttaaatttttgtagaattaaaaaaagtttttttttttaaaggtagtggaagtgttattattatggaagtgttggttagggttgaaaatttattgatagagttttaatagagttgaaatttatttggatagggaagggaattgggtagtattaataataattttttttttttttttatttaatttttattttttagtttttagttttttaatttttttattttttatttttatgtttttgttttgatttttgagtttttttgaaatttattagaaaagttaggataagatagtttgatttaatttttgagttatttttttaggtagtaaatatgttagaaaaatgaaagttgtttggagttgataaggaaatggaagataatgtttttttttgagggggatataaagaatggtgatagggaaagaattaatgattaagtaaaatgattgagaattttgtatgaggtagatgtgtgagttttgtgaagtaagttgattgaatgaaaaataattttgggtagggaaaatgttgttgggggtatttgtgtttattagtattatggatagtgttttgtttatatttaggtttgggtggttttaattagttttagatagaattttaaagttttatatttgattttttaaagtttttttttttttgttaaatagaaaggatattatggaagtttaatgaatttttttgaaaaattaatttgtttaatttggttttt

SEQ ID NO: 287 - DNA, 5942 bp, Artificial Sequence
  chemically treated genomic DNA (Homo sapiens)
taaggattaggattttaatataaatttagttttttatttttttgggttttttatgtttttttaaatttggttgttttttatagttttttgtttttgggtttttttttatattttttattatttttttattttgtatttaagattttatgaaaggtttttttagaaaagaaaaaatgaggagttttgtgatttgaatagtttttttttgtttgtttgtaaatttgaatttttggattttataatagtgagttttttttgtgtttattatttggtatgagtaagataagggggtgggtggtgggagagtggggaagtgtgggaaagaaaagtgtagataaatgggtggaataaagaagtttgatttaaagtttagatttgggggttagagttttggttttagtttaattaagtgtataagtttgataattgtgggtttttttattatattggttttttttagtaaaattttatttatttttatttttagaggttttgattttttttattattttgtattataatatttgataatatgggttgggagtggtggtttatgtttgtaattttagtattttgggaagttgaggttggtggattatttgaggttgggagtttaagattagtttggttaatatggagaaattttgtttttattaaaaatataaaattagttgggtgtggtggggtatgtttgtaattttagttattggggaggttgaggtaggagaattttttgaatttggggggtagaggttgtggtgagttgagattatgttattgtattttagtttgggtaatgagagtgaaattgtattttaaaaaaaaaagaaaaaaattgataatatggtattttttttttttagttgtgaattttttgagggttgggaatgtttttatttgtatttttggtatatagtatatggatttatgtttgtgaaattagtgaattggttgtagttagggaattttttttgggggaagtgagatttgtatgaagttgggtaatttttggtttaggggggttgaaagaataggtgggggatttttaggagggtttgggatttgaaagtgaatttagattggtagggaggtgattttattatgttatttggagaggttgttttttttgatttaggtgggatttgtatgtggtttttaggtttttgtttggtttttttaaaatagtttttagaaaagtgaataaattataaatggttgatttatttttgatttttagtttgttttttatgaagatagagtttattgattaaaaattttaggatttgtatttgggtagattttaggaaggggaagttaaagggtttaggttagaggtttaagtttagattttagtagtagattagggttagattttattaaagttagaatttgaggtttatgtaagtttttagattttgtttttaagttttgtttttttttttttttttttttttttttttttagtttagtgtggttatttgagggggttttttttttttagttatagtttgggtattttaagttgggaaatgtgttatttggggttggggtgttgatttgtagtttagttttttttggttttttttgaggatagtggggatgggattggtatggtttttattttggggttttagttttatttttggtttttagtttttttttagtagtagtttgaagtttgggttggagatgggtattttaagtggaaggttgggaggttgaggattttgtgatagtgatagtaggtgagtagtggatgtgtggtggttggaattttggaagtgggtgttatagtttttgtagtattggagggagggagtaggagatttgtagagaaagaagaaaaagtattaagggtaggggaaggaaaaggggaagagttgaggttttagagggggttggtagggtagaataggatttttttagtttttttgttaaggaataaattgttagttaggtatagtggtttatgtttgtaattttaatattttgggaggtagaggtgggtagatggttttgagtttaggagtttgagattagtttgggtaaaatggtaatgtttgtttttttttttttttttttttgagatggagttttgttttgttgtttaggttggagtgtagtgttatgattttggtttattgtaatttttattttagtgatttttttgtattagttttttaagtagttgggattataggtatatgttattatgttttggtaaagtttgttttttataaaaaatatgtttgagtttaggaagtggaggttgtagtgagttgaaattatattattgtatattagtttgggtgatagagtgagatgagtgagattttgttttaaaaaaaaaaaaaaaaaaaaaaaaagggataaattgtttttttttttatttaatagtgagggatttaggttggtttaaaggtggtggtgagttatttgaattaattgtttatttagttatagattaaattttttattttatttttttttttttttttattattgtatttgatttgttttaaaaataaatttttttaaattattgtgggatttagagtagaatagttgaaagaaaaaaatggtaattagatttagtaaatttttgggtaaggggagggatattagttataatgattatagttaatatttatgtattgtatattatgtggtatgtattattttagtattttatatatattaatttattgaattttaataatgatttttattatttttatttttaagatgagaaaattggaatatgtagatattaggttgtttgtttaagtaagtggaattaggttttaaatttagggagtttatgtttataattatttgattatattattttgttaatttatatatgaggataaggaaagaattttttagtattgtgttggggtgtttggtgtggtgtggttgggagaggtagaatataatgagatatgggtttgagttaaagtttttttttattggttttttgggttttttgtttttttatggttttttttgattatgtgggttattttagggaagttagtttttttagtgagttgagttgtatttttgttatttagtttatagatttttatttaggtagttttatggtttaggagatagtttatagttgttttttggtttgtttgagtagtatatattagtggggtttattagaaggtattttgggtgttgatattttttttagttttttttgttttatgtggttttagtagttttttaagttttggtaggttttttttttgggttgtttttagtatttggtgagttattttatttttagttttaagggattttttttgtttatgtttttttgatgttttttttgttattgtttttgttgttggtgtttttattattttttttttttttttttttttttttttggtaggtttagtttgagatttttgggagttaggagtgttgtttttatttttaattagggttttatagaaagtttgggttgtagttttatttagggtggattttggttttttgggttgtggttgttgttgtttatttttttagaggttgttggggttagtggttggggtgaaggtgatgagtaagggttgggatatggtttttgggagaattgagaaaatgatattaggtaagggaaggatgagataagtaagttaagtttgtggtgattttgtagtaattatagttttagagatttgttgggatgagaaaaagtagttaaaaatatttttttgttattaaagtaattttataatttaggattttgtagggtttaagggagagagattttgtgtaaaaatatggaattttataatattgattttgttttttagtaaagattaataaaattttatgagattgttgtttagaggttttgtgtttggtttttatttttatttttattaataataaatattagtttttttttgaaattatttttttattttgtaagatatattagtaggaaaaaaaaattagtttggttttttaagttttttgtgattttattttggagttttttttttttaaataaaaatagatgggttattttttagaagattttggggagagttttttatatgtgttgttgtgtagtttttgtattgtaaaatggtgttattttaattagaagagttgatataattaaatagttatatggtatgaagatgtatgtgtggtgataataataataaaaattataatttatattatttgagggtttgggtgtgtgtaaagttttgggtttagttttttgtgttggaatttttttaatagtaaatgagtaaagttttgtgtgtttaggtggtgtgagtattaggatttgttggttggggttttatttttatataatgtttttataatgttttttgttttttttaatgtggtttttgttttaagtttattttttggagttaggaatttattttgtgggttaggaaaggtttttaggaggtggagggaaatttgtggaatgttgagaagttgtgtaatgaaataatgttatgtttgttttttattattattttgattagggtttgaaggttatatttagagtttaaggggaaatggagaagtgtaaagggatgagtagaatggttggtattattttaggttagtgtattgggatgttttagtttttatattgtttattttattttatttaagtttttatgtatggagttaagttgtatttttttttttatgaggtaggagtttggaggaaatagtatgtttgttaagggtttttggtgggattgatttgtattaggggtttaataggtaataaggatttagtggattggttgaggataggttagttttttgggtagtagtgttgtgttgggattagaggggaatgtgaggagagttgtggaaagagatttagtttggtttttttttttttttgttttaagttagtttttttatttagtgagtataaaattgtattgtttagatttttgggttttgaatgttatatttggtttttgtttttggtggttttttgttgtgttttgtttgtaagtgtttttttttgggtttttgtgatagttaggttgtgtgtgggttattttgggattggtagtttgtttttttttatttagttagtttttttttttattggggattttgtgttttggtatttattgtggtatttgatttttggtgtttgtgtgttgtttttttttttattttttttaatttttattttttttattttattttgtttgttgtggttgggtttgtggtttgtgttgtagtggttgttgttgttttttggaagtagtaatttttttattttattttagttttggtttttgtttagttggtgagtttgaagttgttgttgttttgagttttttgttgttgggagtggtatatggggtttttggattttgatgtgggggtgggggaggaagtgattaggtttggtatgaaggagggagaggtggtttgaggagtggaggggggatgtgtggattttggtgaaagggatttgataattgtttttaatttgtgagaaaaggaggagtttggtttttgtttgagaatgataaatttggaaatttttgggaaaggtgtgggggttatgtagagatttgtattggtagggagtttgagttgaggtttttgttggagttgatatagaggagagagggttttggtttttgggagttttagggatgtgggttgggttggtgggttaaagtatttgttggttttttttaagtggtgggattttaaagaatgtttaattttaaagaaaaggggttgagatgtaaattagaggagttggagaggagtgttttagagtttgggttgttttaagaaagggtggttttgaatttttttgtggttggagggttgaatgtgggaggagggaggatattagaggtagggaaggagaatttgagttttattgatattgttttttttttagt

SEQ ID NO: 288 - DNA, 5942 bp, Artificial Sequence
  chemically treated genomic DNA (Homo sapiens)
gttagaaaaagaatagtgttagtaaagtttaagttttttttttttgtttttggtattttttttttttttatatttggttttttaattatgggagaatttggaattatttttttttaaagtaatttaaattttgaagtatttttttttagtttttttaatttatattttagttttttttttttgaagttaaatattttttggggttttattatttgaaagaagttaatagatattttgatttattagtttgatttatatttttggagtttttgaaggttagggtttttttttttttgtgttaattttggtagggattttgatttaggttttttattaatataagtttttgtatgatttttatgttttttttaagggtttttaagtttattatttttaagtaagaattgggttttttttttttttatgggttgggggtgattgttaggttttttttattggaatttatatattttttttttgttttttaggttattttttttttttttgtgttggatttggttgtttttttttttgtttttatattaaagtttggagattttatgtgttgtttttagtgataagggatttggagtagtgatgattttagatttattggttggatggggattaggattggggtggggtagggaagttgttatttttagggaatggtggtgattgttatagtgtaggttgtggatttgattgtggtaggtgaagtggggtggggggagtggaaattagggagggtggggaagagggtaatatgtaagtgttaagggttaggtgttgtggtggatgttgggatatggagtttttggtagagaaagaaattggttaaatgagagaaagtgaattattaattttaggatgatttgtgtatgatttggttgttatgaaggtttggaggagggtgtttgtgggtggggtataatgagaagttattggaagtggaagttaggtatggtgtttggggtttgggagtttgggtaatatagttttgtgtttattgggtgaagaggttgatttagggtggggaaaggaggaagttaggttggatttttttttgtagttttttttatgtttttttttagttttggtgtggtgttgttgtttaggggattggtttatttttggttaatttgttgggtttttattgtttgttgggtttttagtgtgaattagttttgttagagatttttgatgggtatattgttttttttgggtttttgttttatgaggggagaggtgtggtttggttttgtgtgtagggatttgggtggggtggggtgggtggtgtgagaattggaatgttttagtgtgttaatttgaggtggtgttagttattttgtttgtttttttgtatttttttatttttttttaggttttaagtgtgatttttgaattttggttagagtaatggtgaggggtaggtgtgatgttattttattatatggttttttggtattttataggtttttttttgttttttgagggttttttttaatttatagagtggatttttggttttagaaaatgggtttggagtgggggttatgttgaggaaggtgaagggtattgtgggggtgttatgtaaaagtaggattttaattgatagattttagtgtttgtgttatttgggtgtgtggagttttgtttgtttattattgaaaaagttttagtgtgggaaattgaatttggagttttgtgtatgtttgagtttttaagtaatgtgggttgtggtttttgttgttgttgttgttatgtatgtgtttttgtgttgtgtggttatttgattgtgttaatttttttgattagaatggtgttattttgtggtatggaagttatatagtaatatgtataggagattttttttgagattttttagggagtgatttatttatttttgtttgggaagaggaaattttgaaatgggattgtggaagatttaaagggttaggttgattttttttttttattggtatgttttatggggtgggaaagtggttttagaaagaggttggtgtttattgttggtgaggatgggggtgggggttggatgtaggatttttggataatagttttatggagttttattaatttttattaaggagtaaagttggtattgtagggttttatgtttttatgtaaagttttttttttttaggttttgtagagttttaagttgtggggttattttagtggtaggaaagtgtttttgattatttttttttattttagtaggtttttgaggttgtggttgttatagggttattatgagtttggtttatttgttttattttttttttgtttggtattatttttttagtttttttaaaagttatgttttggtttttgtttattatttttattttagttattgattttagtgatttttggaaggatgggtagtagtagttatagtttgagaagttagagtttattttggatggggttgtagtttgagttttttatgaggttttgattggggatgagagtagtgtttttgatttttagagattttagattgaatttgttagagaaagaaagagaaagaaaagaagaataatgaaggtattagtagtagaagtagtggtagaaggagtattaggaagatatggataagggagattttttgaggttgaggataagatgatttattggatattgagggtagtttaggagggggatttgttagaatttaggagattgttggaattgtatgaggtaggaggagttggggggaatattaatgtttgggatgttttttggtggattttattgatgtgtgttgtttgagtgggttagggggtagttgtgagttattttttgggttgtggggttgtttgggtgggggtttgtgagttgagtggtagggatgtggtttagtttgttgaagaagttggtttttttgaggtagtttgtatggttagggagagttatggagagataaggagtttggaaaattggtaaggggaaattttagtttagatttatgttttattgtgttttgttttttttagttatattatattagatgttttagtatagtgttgaagagttttttttttatttttatgtgtaggttgatagggtagtatagttaagtggttataaatatgagttttttggatttaaagtttgattttatttatttgggtaaataatttaatgtttatatgttttagtttttttattttagaaatgggggtagtaagaattgttgttaggatttaatgggttaatatatgtaaaatgttagaatagtgtatgttgtatagtatgtaatatatgaatgttagttatagttattatgattaatgtttttttttttgtttaagagtttgttaggtttggttattattttttttttttaattattttgttttggattttataatggtttaaagaaatttgtttttaagataagttaagtgtagtagtgagaaggaggggaaaagtggagtaaggagtttgatttgtaattgagtgaataattaatttagataatttattattatttttggattagtttggattttttattgttaagtaggaaggaaggtaatttgtttttttttttttttttttttttttttttgagataaagttttatttattttattttgttgtttaggttggtgtgtaatggtgtgattttagtttattgtaatttttgttttttgggtttaagtatattttttgtagaaagtaggttttgttgggatatggtggtatgtgtttgtaattttggttatttgggaggttgatgtaggagaattgttaaggtggaagttgtagtgagttaggattatggtattgtattttaatttgggtagtagagtaagattttattttaaaaaaaaaaaaaaaaaaaagtaggtgttgttattttgtttaggttggttttaaatttttgagtttaaagttatttgtttgtttttgttttttaaagtgttgggattataggtgtgagttattatgtttagttggtaatttgttttttagtagaaaagttgaaaagattttattttattttgttagttttttttgaggttttaattttttttttttttttttttttgtttttaatgtttttttttttttttttgtaggttttttattttttttttttagtattgtgagaattgtgatatttatttttaagattttaattattgtatatttattgtttatttgttgttattgttgtagggtttttagttttttaattttttatttggggtgtttatttttagtttgggttttaaattgttgttgagggggggttgggagttaggaatggggttgggattttggggtgagggttgtgttaattttatttttattgtttttaagagagattaggaaggattaggttatagattagtattttagttttgagtgatatattttttagtttgggatatttgagttgtggttgggagggagagatttttttgggtggttatattgagttggagggaggagagaaggagggaggagaaagatagggtttgggagtgggatttaaggatttatatgaattttgagttttgattttggtaaagtttgattttagtttgttgttgaagtttgaatttgggtttttgatttgggttttttgattttttttttttgggatttgtttagatgtagattttgaagtttttggttaataggttttgtttttgtgagagatgggttgagagttagaaataaattaattatttgtggtttatttatttttttggaagttattttgaggaagttaaatagaagtttgggagttatatgtaagttttatttgagttagaaggggtagtttttttaggtggtatgataaggttatttttttgttaatttgggtttatttttaggttttagatttttttgggagttttttatttatttttttaatttttttggattaagaattgtttagttttgtgtaagttttattttttttaggaggagttttttgattatagttaatttattgattttataaatataagtttatatattatgtgttaagaatataggtaaagatatttttaatttttaaagagtttatagttggagagggaaagtgttatgttattaattttttttttttttttttgagatgtagttttgtttttattgtttaggttggagtgtaatggtatgattttggtttattataatttttgttttttgagtttaagggatttttttgttttagtttttttagtagttgggattataggtatgttttattatgtttagttaattttgtatttttagtagagatggggtttttttatgttggttaagttggttttgaatttttgattttaggtgatttgttggttttggttttttaaagtgttggggttgtaggtatgaattattatttttggtttatgttattaaatattataatgtagggtgataagggaagttaaggtttttagagatgagaatgggtagggttttgttggaagaggttagtgtgataggagggtttatgattattaagtttgtatatttagttgaattgggattagaattttagtttttaaatttaaattttaagttaaatttttttgttttatttatttgtttatattttttttttttatatttttttatttttttattatttatttttttgttttgtttatgttgggtggtaggtataagaagagtttattgttgtgaaatttaggaatttaaatttgtagatgggtaggggagggttgtttaagttgtaagattttttatttttttttttttgggaaagttttttatgaagttttggatgtgaaatggaggagtggtgggggatgtggaaaagaatttaggggtagggggttgtagggggtgattgagtttagggaagtatgagaaatttgggaaaatggggagttgggtttatattaaggttttggtttttg

SEQ ID NO: 289 - DNA, 6090 bp, Artificial Sequence
  chemically treated genomic DNA (Homo sapiens)
tagagatggaatgtttaaattaggataatttagggaggtgtgggagaggtgtagggggattataagggatggagtaggaatttaaggtagtaatagtagagttggtattaattttaggtttaaaaagataaaggagagagagtggttattaaaatttagaaagagaaaatttggtaaaagatgggatttggtgaggagtagtaatttgtgtttggttgtggattgtggtaattttgtagggaggagagtagaggaatgattattttggttttatttttttttttttttttttattttatgttaggtgttttattggttaaatttattagtaattagaggataaggaatgtattaaaataattttatggtttagagagtagattagatgtagagtgataaatggattatatttagtataattgtaggtttatttgttgatttgttttttttattagattgagttatttgaggatagagaatgttttttttatatttgtatttttaatatttggtggatattagatatttaagaaatgtttatggatgggattagagaagatggtaaattgggtattagatggaggtttgtgttttttgagtttgttgtatgttttttggtgaatttaaggtaaaatgagaaatagaatgagttttgtatttttgtttggtaaaagaaaatatgatttggtgagaagaaatgaatatttttagtatttagtgttgggaggaattggaattagttatgtgattgtttttattagaggtttttaattgtgtaatggatagaatttttaatggtgaaattataatgtagaaatatttttttttttttttttttttttttttttgagatggagttttgttttgttatttaggttggagtgtagtggtattattttggtttattgtaagttttgttttttgggtttattttatttttttgttttagttttttaagtagttgggattataggtatttgttattatatttggttaattttttgtatttttagtagaaatggggttttattgtgttagttaggatgtttttgattttttgattttgtgatttgtttgttttggttttttaaagtgggaaatatttttaaaaatattagtttttgataaaattaaagttatgttataaaaaagtaattaaaaggtggaaatgagataatatggtttattttgagttgagaatattttgttagaaaatgattgttttagattttaaatttgattttttatataaatttttagtgtaattttttttgtattatttttttttttattagttaaaagatggaaaggataaattgaggaatttatgttggaggagtatggatttattagatggtagaaatttgggtttttgaatgattattgtggagttgatttttgtttatgttttgtaaatttttgtgttgagagtaagtaatatatttttaatgtgttaaatttttgggatttgttgggttttatagtaatggttattttattttaatatgattgtaaaataatgttttaaaatttatagttgggtttgtttaaaatattattgttattattattataatttatagtttatattataattatttttatagaagttttttttaattggtattttataatttgtggttttttatattgttgttttttatgtgtgagatgtttttttgagttttttttgttagggatatgatagaaaataaaatatttaatattttggtgtattttataatgtataaagttttgttttatgtattatttttttagatttttttaataaatttaaggaatatgtaagggtttataattatttttattttataggtgatgaaattgagatgtttatatgtaaagtggaaataattatttatttatttatttatttattaaataaaaattttgttaatttatttaaagattaattgagagaattattttatttgtttggaatttggtatgtgttaagagaaaagtttttttaatttttttttttaagaagataatttattgttatataataaattattttgaaataatgatttaaaatattaaaagttattgattttgtttatagaatttgaattggaagatataaataattgggagtgagggtggggttggatagttggtttttttgggtattttttgttttttttgtggttttgttatatgtttttatatggtagttttagggtaattatgatagttgaaggttttagagtgggtggagggggagagggagggagggaaagagagagagagagagagagagagaaagagaagtaagtaggtagaagttttaatgttttatgatttaattttggaaataaattatattgtgttattgttattatttttttttagaagtaagtagatagggttggtgaatatttattgagaggggaattagattttattttttgattgggggagtgttaaagaatttgtgaatatgtttttaaatgattatattttttttttttaaaatgtttgtttaaattggtgtatataaaaagtttgggggttagtgatttatttaaggttattaagttgttaaatggttttattaatattagatttaattttgtgattttaaattttatgtttttttttattattttagataatttttggtgaatattattgtttattagggtagttaagatattttagttgttaaatagatttagtttttttaattgttttggataatatattttttattttgtagaaaataaatattatttatatggtagttatttataaatattttttaagtttattttaaatatttgtgttttaaatttttttttttaatagatgtatttatttgtatttttttagatgaattattttttttttgttgttgttgttatttttgattgtattttttattttttaagatttttttgtattattaagtttattgtttaagttaatattattttttaatttggggatttttttttgatttttgtgtgttttttttgtgggttattaatgtaatgttatttaagattaggatttggttgggtgtagtggtttatgtttgtaattttagtattgtgggaggttgagttgggaggattatttgaggttaggagtttaagattagtttgattaatatggtgaaattatgtttttattaaaaatataaaattagttgggtatagttatatgtttgtaattttagttattgggtagtttgaggtaggagaattgtttgaatttgggaggtggaggtggagtttgtagtgagttaagattttataattgtattttagtttgggttataagagtgaaaatttgttttaaaaaaaaaaaaaagattaggatttgatataaggtttgaggggtatttttttgttttgttttgttttgtttttaagaggttaaaatttttatagttgaaaatttttgttgaattatagagatttgaattaatttagtttagaaagtttggggatttgaataatggtatggattggaaatttttttatttgttagtttttattattttaggtagtaaaatagatttttttttaggagttttttattgtttggggttttttagtagtgggatgtggggaattaatttttttttgtttttatttaaatattaggtgggagtaaggggtgggaagtagagaaagtggatagaggtttttagtggatatgggatttttgtgtagattagtatagtttttagaaattttatgtaagtaatataggtattgttatattttttagtggttattttttaaaaagtaaataggtgaggttgggtgtggttgttatgtttgtaattttagtattttgggaggtttaggtgggtggattatgaggttaagagatggagattattttggttgatatggtgaaattttgtttttattaaaaatataaaaattagttgggtatggtgatgtgtgattgtagttttagttattggggaggttgaggtaggagaattatttgaattttggaggtggaggttgttatgttttattatattttagtttggtgatagagtgagattttgttttaaaaaaaagaaagtaaataggtgaaattaattttaataatatattttgtttaatttaatgtatttaaaatattattatttgaaagtgtaatgaatataaaaatatttatgagatattttttatttttatatttatattgttttggattttaatgtgtattttatatttatagtataattaatttgggattagttatattttagtttaataatagttaatagtatatgggatagtgtaaataaattttgtgtttttgttgtttttttgggttttggagattttaattttttttttagattgtaaatttttttgtttttaagttttggttttaatattagtttggtagaggaatttagtttaatgaggtatgttttttttttgttattttttattttattaatttgttttgtggtaaatgtaggattgattttttaaaattattttattaattagtttatatatttattatttatttgttttattagaatgtaggtttttggaaggtagggatttaaaaaaatttgttttgttttatgtgatttttttatattaagtattgtgtttggtataagttgggattttagtatatattttgggatggaagaattgtgtttttttagaatttagttagagggtagtttagtaatgtgttataggtggggtgtttgtgttttgggtggatgtattggttttttggttggtgtgggtgtggggtgagtgggtgtgtgtggggtgtgtgtggtagagtgtgttagtgagtttggagtgtggagttgggaggagtagtgagtgttgtgtagaatttgtagtgttggtttggtagggtagtttggaggtgggtgggttgtgttgttagtttgtttgtagggtttttattggttgtttgttggttgttttttgtttaaaaggtggtaaggagttgagaggttgttttggagtgtgaggaggatagttggattgagttaatgttggggattttgttttttttgtggaggggatttggtaatttgtagtggtagggtttggggttggtgtttgggagggatttgtgttttttatttattttttagttgtgtttttgttgtgttttggttagtttttggtgttggtgtttatggttggtttttgatagtgttttggagggattgggggagtttttaggtgtttgggtgagtagttaggtgtggttttttggtttttttgatttttggtgttagtttttgtttttttagttagggtgtggtggggtttgtttgggtagtgttttgagtaattgggaaggttaaggtggagggaaatttggttttggggagaagtgtgattgtagttgggaggtttttttagttttgtgggttgggtgagaataggtggtgttggtttgattaggtgttttgtgttggggtgtgaggatttggagtgaattgttgtgttttggtgggttgttttttttttttttttgtttttttgggtggttgtatgttgggttggttgggtaatggagagggagttgttaggaatgtggttttggggattgttttgtttggggaaggggagagggtggttatggtgttaggagaggtgtgggagttgagaggtggtgtgggggtgttattgttgttgtaggttggagagagattgtttttagtgaggtgtgtattgtttgggtgagggttttatttttttgtggtgtttttggaggtgggaaagttgggtgggtatgtgtgtagagaaaggggaggtggggaggttagttatttttggagttggttttgattttaatagattgtttagtgtttggggatgttgattttggggtgttgtggtgtttggttttatgtgtgtgtggggttgaggggttgggggtgtttttggttgtttagttttaataaagggtgtttttttttattttgtgaggaggggtagttttggagatttggtttttagtgagtggggttttagtgttggggaggtttatttttttttggggttgttattttattattattattgttttttttttttttttaaaagg

SEQ ID NO: 290 - DNA, 6090 bp, Artificial Sequence
  chemically treated genomic DNA (Homo sapiens)
ttttttgaagaaaaaaaaaaggtaataataatagtaaaatggtaattttaaaaggaagtagatttttttggtgttaagattttgtttgttgaagattgggtttttggagttgtttttttttgtggggtggagaggagtattttttgttaaagttgggtggttagggatgtttttgattttttagttttgtgtgtgtgtggggttgggtattatggtattttgaggttggtgtttttaaatgttgggtggtttgttgggattagaattggttttggaagtgattggtttttttgttttttttttttttgtatatatgtttatttagtttttttatttttagggatgttgtggaagaatgaagtttttgtttagatggtatgtgttttattgggagtaatttttttttagtttgtggtaatggtggtatttttgtgttattttttggtttttgtgttttttttaatattgtggttattttttttttttttttgagtgaggtagtttttagagttatatttttggtgattttttttttgttatttggttgatttggtgtgtggttgtttgggggagtaagggagggaagggagtggtttattgaggtgtagtagtttgttttagatttttgtgttttgatataaagtgtttggttgggttggtgttatttgtttttatttggtttgtggggttggggaagttttttggttgtgattgtatttttttttgaagttaagtttttttttgttttggtttttttagttgtttgaggtattgtttggataaattttattgtgttttggttgggaaagtaaaagttggtgttgggggttggggggattggggagttgtgtttggttatttatttgggtgtttgggagtttttttggtttttttggagtgttgttggaggttgattataggtgttagtgttggagattagttggggtgtggtgggaatatagttagggagtgagtggggggtgtagattttttttaggtgttggttttagattttgttgttgtgagttgttgagttttttttgtggagggaataaagtttttggtgttggtttggtttggttgttttttttatattttgaagtagttttttggttttttgttgttttttgggtggagggtggttggtaggtggttaatggggattttgtaagtgggttggtggtgtggtttatttatttttgagttgttttgttaggttggtgttgtgggttttgtgtggtgtttgttgttttttttagttttgtgttttgggtttgttggtgtgttttattgtgtatattttgtatatatttatttgttttatatttatgttggttggggagttagtgtgtttgtttggaatgtgggtgttttatttgtgatatattgttaagttgttttttgattgggttttagggaaatatggtttttttgttttgagatgtgtattgggattttagtttgtgttgggtatggtgtttggtatgggaaaattatatagaataaaatagatttttttaaatttttgttttttggaaatttgtattttggtgggatagatagataataaatatgtaagttaattaataaggtaattttggaggattagttttatgtttattatgaaataggttaatggaatagagaatggtaggaagggagtgtattttattagattgggtttttttgttggattggtgttggagttgaggtttgaaggtaagaaggtttgtaatttgaagaaagggttgaggtttttgagatttaaagaagtaatagagatgtagagtttatttgtgttattttatatgttattggttattgttgagttgaaatgtagttagttttaaattaattgtgttgtaagtgtaaaatatatattagagtttaagatagtatggatatgagaatgaaaaatattttatgaatatttttatatttattatatttttaaatgatagtattttggatatgttgggttaaataaaatatattattaaaattaattttatttgtttatttttttttttttgagatggagttttattttgttgttaggttggagtgtagtggagtgtggtaatttttatttttagggtttaagtgatttttttgttttggtttttttagtagttaggattatagttgtgtgttattatgtttagttaatttttgtatttttagtagagatggggttttattgtgttgattaggatggtttttattttttgattttgtgatttgtttgtttgggttttttaaagtgttgggattataggtgtgatgattgtgtttggttttatttgtttattttttaaaaggtggttattagaaaatataatagtatttatgttgtttgtatgagatttttgaggattgtgttggtttatataaagattttatatttattggagatttttatttattttttttattttttattttttgtttttatttaatgtttgggtggagatgaagaagggttgattttttatattttattgttggagaattttaaatggtgaaaagtttttaaagggaaatttattttattgtttagaatgatgaaaattgatagatgaagagatttttgatttatattgttgtttaaatttttaggttttttaaattgagttggtttaaatttttgtggtttaatagaaatttttaattgtgaagattttggttttttgaaaataaggtaaaataaaataaaagaatattttttaggttttatgttaaattttagttttttttttttttttgagatgggtttttgtttttgtggtttagattggagtgtagttgtgaaattttggtttattgtaaattttgtttttgttttttgggtttaagtgatttttttgttttaggttatttagtagttgggattataggtatgtgattatgtttggttaattttgtatttttagtagagatgtggttttattatgttggttaggttggttttgaatttttgattttaggtgatttttttggtttggttttttatagtgttgggattataggtgtgagttattgtgtttagttaaattttagttttaaataatattgtattaatgatttataggaagggtatataggaattaaggggaagtttttaaattgggagatggtattagtttaagtagtgggtttgataatataaaagggttttgagaggtgagaaatatagttaaaaataataataataataaaaaaagagtgatttatttgggaaaatgtaaatgaatatatttgttgggagaaaaaatttaaaatatagatgtttgggataaatttggaaggtgtttatggatgattgttatatgggtaatatttattttttgtaaaataaaaaatatattgtttgaggtaattaaaaggattgaatttatttggtagttagaatgttttaattattttaatggataatgatgtttattggagattatttggagtagtgaaaaagagtatgaaatttggagttataaaattagatttagtattggtggaattatttaatagtttaataattttggatgagttattaatttttgagttttttgtgtatattaatttagataagtattttagaaaggggaaatgtggttatttaaaaatatatttataaattttttgatatttttttaattaagaggtggagtttaattttttttttaataaatatttattaattttatttgtttgtttttaagaaaaggtagtggtagtggtatagtgtaatttatttttaaggttaggttataaggtattagagtttttgtttgtttgtttttttttttttttttttttttttttttttttttttttttttttttttttttttttatttattttaaagtttttagttgttatgattattttagggttgttatgtagagatatgtgataaaattatagaaagaatgagagatgtttagagaagttagttgtttagttttatttttatttttagttgtttatattttttagtttaagttttgtgagtaaaattaatgatttttaatgttttaagttattattttagagtggtttgttatgtagtaatagattatttttttaaaaagaaaaattaagaaaattttttttttaatatatattaggttttagatagatgaaataatttttttaattaatttttaaataaattagtggggtttttatttaataaataaataaataaataagtggttatttttattttatatgtaaatgttttagttttattatttgtgaaatgaagatgattatagatttttatatattttttgggtttgttgggagaatttaaagagataatgtatgaaataggattttgtatattataaaatatattagaatgttggatattttattttttattatgtttttagtaaaaaggatttagagaggtattttatatatagaaggtaataatataagaagttataaattatgagatgttagttgagaaggatttttataaaaataattatgatatggattatggattataataatgatggtgataatattttaaataaatttgattgtagattttagaatattattttatagttgtattagggtaaaataattattgttataagatttaataaattttagaggtttaatatattaaaaatgtgttatttgtttttagtataaaggtttgtagggtataagtagagattagttttatagtagttatttagaaatttaggtttttgttatttaatgaatttatgtttttttagtgtaagttttttagtttattttttttattttttggttgatgagagaagagataatatagggaggattgtattgaaggtttatgtaggaggttagatttgaagtttgagataattattttttggtaagatgtttttagtttaaagtggattatattattttatttttattttttggttgtttttttgtaatatggttttggttttattaagggttaatatttttaagaatgttttttattttgggaggttgaggtgggtagattatgaggttaggagattaagagtattttagttaatatggtgaaattttatttttattaaaaatataaaaaattagttaggtgtggtggtaggtgtttgtagttttagttatttgggaggttgaggtaggagaatggggtgaatttgggaggtggagtttgtagtgagttgagatggtgttattgtattttagtttgggtgatagagtaagattttgttttaaaaaaaaaaaaaaaaaaaaaaaaaagaatgtttttgtattgtggttttattattaaagattttgtttgttatgtagttgagagtttttgatagaggtagttatatgattgattttagttttttttagtattgagtgttaaaagtatttatttttttttattaaattatatttttttttattagataaaagtatagagtttattttgttttttattttgttttggatttgttagaaagtatgtggtaagtttagaaagtataaatttttatttaatgtttaatttattattttttttgattttgtttataagtattttttgagtatttagtgtttattaaatgttagggatatagatataagagaaatattttttgtttttaggtaatttagtttgatgagggagatggattaataaatagatttgtgattgtgttaaatataatttatttgttattttatatttaatttattttttgagttgtaagattattttaatgtattttttgttttttggttgttggtaggtttagttaatggggtatttgatatgagatgaaggagaaggaaggagagtgaagttaagatagttatttttttgtttttttttttgtaagattgttatagtttatagttaaatataggttgttgttttttattaggttttgttttttattgggttttttttttttgggttttggtaattatttttttttttttgtttttttgagtttagggttggtgttagttttgttattattattttgggtttttgttttattttttatggtttttttgtattttttttatatttttttgaattgttttaatttgagtattttatttttg

SEQ ID NO: 291 - DNA, 3720 bp, Artificial Sequence
  chemically treated genomic DNA (Homo sapiens)
tgtagttgtttattaaaattttatatatattttggtatataattatatttgttggaatttattttatagatatatttatatttatatagttaaggatgttgattttaataatattggtataagtaaaaagttggaaattgtttatatgtttatggataggggataaattgattaatttaaggtttttttttataatggagtattatatagttttgaaaaagaatgataagatttttatgttaggatatggtataatttttaagttattttaagtgaaaaaataataataataataatattgtagaataatgtgtatggttggatatatataaatttttttgaaagaatatttaagaaatttaaatgtggttattttaggagttaggaatgaggtaggtggagaggagggatttttattttttaatttagaatatattttgttgtgttagttgattttttttttattgttaataagtattatagttttttttaatttaaattattttttttagtataaatttaaaaaaaaaaaatttaaaatggaaaaatatataggtgtgagtaaaagaaatgaatggtaataatttttgtggtttattgagtgtgtttggatatttatgtgtttttagtttttttttataggaaatgtataggtgagaaattgatgttaagggggattgagtgttaagttagttagtggtagagggtagatttaaatttaatatggtttttttttgttgttttttggtttttgtttttaggtgggaagtgtatttattggatggttggtttggtgaggtgtagtgttttagattggtgtatttgtggttttagtgttttatgtttggggagtgtgtgtgtatgtagtggtgtgagtttggtggtggtggtgataataataatgttatagtttgagtttttttttttggagtttttggtatatattttgtgtttatgtttgggtatttatgttatggtggtagggttggggttttttaaaatggtagtggtttggggagttggaagtttggagttagtgttgttgtagttatataagtgggggggttgtgggttgggggagtttggtagtgttttggagaggtgaggagttgttgtttgaggttggtgtgggtgagtgagggtgttgtggttttttgattttttttttagaggtgagtgtttgaagttaggagtttggtgtttataggtttgtgtgttgtggggaatttttattgttagtttttttgttatttgtgtgtttttaagtttagtgggtgaggttttgggtgttttatagttggtgttgtgttatgttttattttagtgagttttttgaatttgatgtgttttttgttaagtttattgaaggttgttgtgttgaatttagtgttgaattgttttggttgtttgttagggatgtttttgtggttattggttattttggaggtaaggagggtgagtaggggtgtttagatgatgatggtgtagtgtgggggtgtattatatttgagaattaggagggattgggatattggagttatgagaataggggtgatgggaagtttaggagttttggggtgtgtatttttatttttatttatattgggttgttagtgtttttgtaggaatttgtgtggttattggagtgtttttttgtttgtgtatgtgtgttttgtgtgtgtatgtttttatgtgttttttgggatgtatgtgggtttttgttgaattagaatgtgtaaaaggtattttgtgtatatttgtgggtattaagagttttgtaggtaggggttgtggatttaggtgtattttttgatgtgtttagagttgatttttgttttttttttagtaggtgattttttgagttgggttttgaatagttgtggtgtaagtggggatttagttgatttttgttttttggaggggtttgtgtttatatttttttttggttttagttatagtggtagtttttttatttaggtagtgtttgaatatttgtatgatttggaggtattttttaattttatgttgggtgttttaggtttggtatttttttttggtttagaggtagtagtgtttagatttttgttggatgtttttttttttgtggggtttgatgttttgttgttgggtttgttggatttttattttttggatttgggtgttgttttttttttagaggtgttttgggaggttttgttttgtgtgggtgtttttttgtagtgtttgtatgagttttagttttttttgtttgatgttaagtttggtttttggtggttttttgttttgttagtgttggatgttgtttttgtttttaagggtttttatgtgttttgggagttgttttttgtgggggttttagggaattgtgggttatagggagattattaggttgttttggaggtttgtttttttgtaatagggattaagattgaggatttgttgtttattagttgttttgtggaattgttggttgttttagttaatagattttattttagtggggtttatgatgtttttttgttggttttgggtgatttaggggagggggttgagggtttttttgggtttttgattttttttagtggggagggagggagtagtggtgatggtggagagtttttggttagtatgtagttttagttttttttgttgggtttttgtagtgttgttgtggtggatttttttaaatttttggtggtggatatttttggaagtagtggtgtggttgtattatttgtgttgttgttgttgtttattttttttttttaggttaaggtgtgatgtaaggggtgttgtggtggtaaatgtagtatgtgttgtttttgtttgtggttgtatgttaaggtttttgtttgtttggtggagagttgtgtgtggagttttgtgtgttttgatgagtttaattgttatttgtgtatttatatgggttataaatttttttagtgttgtatttgtttttgtaattttagttgtagtgattattttattagttatgtgtgtatttatattggtgagaagttttttgtttgtgatgtgtgtggttgttgttttgtgtgtagtgatgagaagaaatggtatagtaaggtgtattttaagtagaaggtgtgtgttgaggagtggtttaagggttttggtttttatttgttgggttttttttttgtttttttttgagtaagagatgggtttatgggttggggtgttgttgtttggtgtgtatgagttttgggttgtttttttttttgttttttttttaatttttttttgtatgtttgagggttggtttttgttttgtttttagtttttttgaagtgtttgttgtatatgttttatttagtattagtttgttggatagtttttgtggtttaggtgttgttatttttgttagttgtgttttgggggaagttttttgagattatttagtgaataggtattattttgggatttaagatagttttttgtaattgtatatgttttatgtttttttttataatttttagagataggttggggtaggttaaggtggttttgtgtgggattttgtatagtagtgttttatttagtagttgattggatgtaatgttttgttttgggttttttttttttttgttgttgttaatttttgtaaagtagatgttatttttaagtagttgataaaattgtttatttttgtaattaaaattattgtgttaaaagtttattgaatttgttatgtaagttttt

SEQ ID NO: 292 - DNA, 3720 bp, Artificial Sequence
  chemically treated genomic DNA (Homo sapiens)
aggagtttatatggtagatttagtaagtttttagtataataattttaattgtaaaaataaatagttttgttaattgtttgagagtagtgtttgttttataaaaattaataataataaaaggaaaaaaaatttaaagtaaaatgttatatttaattggttgttggataagatattgttgtataaagttttgtgtgagattgttttggtttgttttagtttgtttttgggggttatagaggaaggtgtggggtgtgtgtagttataaaagattgttttgaattttagggtagtgtttatttattgggtggttttagaagattttttttaaagtgtggttgataagggtgatagtgtttggattgtgggaattgtttggtgagttggtgttgaatagggtgtgtgtggtgggtgttttaaggaaattggaagtgggatggaggttggtttttgggtgtgtgaggaggagttggaagaagagtggggaggggaatggtttggaatttgtgtgtgttgaatggtggtgttttaatttataaatttattttttgtttagagagaagtgaaggagaggtttagtgagtaaaagttgaggtttttgagttgttttttggtgtgtgttttttgtttgaggtgtattttgttgtgttgtttttttttattgttgtgtgtgaagtggtggttgtatatgttgtaagtaaaaggttttttgttggtgtgggtgtgtatgtggttggtgaggtggttgttgtggttgaagttgtggaggtagatgtggtattggaagggtttgtggtttgtgtggatgtgtaggtggtgattgagtttgttggagtgtgtaaagttttgtatataattttttattgggtaagtgaaggttttggtgtgtggttgtgggtagaagtagtgtgtgttgtatttgttgttgtggtgttttttgtgttgtgttttggtttgggggaaaggggtgggtggtggtggtggtatgggtggtgtagttatgttattgtttttagggatgtttgttattagaggtttagggaagtttgttgtggtggtgttgtgaaggtttagtggggaaagttgaggttgtgtattggttagaaattttttgttgttgttgttattttttttttttttattaggaggggttaggagtttagggaggtttttagtttttttttttaagttatttggggttagtgggaaagtgttataggttttgttgggatagagtttgttggttgggatggttggtagttttgtagggtagttgatggatagtaagtttttaattttggtttttattatgggaaaatgagtttttggggtggtttggtagtttttttgtgatttatagttttttggggtttttatagaaagtagtttttagggtgtgtagggatttttgaaggtagagatagtgtttagtgttggtgaggtgggaggttgttggaggttgggtttgatgttgggtggggagagttgaggtttatataggtattgtgagggggtatttgtgtaaggtgaggttttttagaatgtttttgggaaaggggtagtgtttagatttggggagtaaaggtttggtggatttggtagtaaggtattggattttgtaggaaaaggggtatttagtggggatttggatgttgttgtttttggattggggaagggtgttaggtttaagatgtttgatatgaggttgaagagtgtttttgggttgtgtgggtgtttgggtattgtttgaatgaagaagttattgttgtagttgaggttgggagggggtgtgggtgtaggtttttttaggaagtaggagttggttaagtttttatttgtgttgtagttgtttaaagtttagtttaagaagttgtttgttgaggagggagtaggaattagttttgggtatattaaagggtgtatttgagtttatagtttttatttataaaatttttggtgtttatggatatatataaagtgttttttgtatattttgatttagtaggggtttgtatatgttttaaggagtatatagaaatatgtatatgtaaaatatatgtgtataggtaaaagggtgttttgataattgtataggtttttgtggaggtgttggtggtttagtgtgggtgggaatgggggtgtgtattttaggatttttaagttttttattgtttttatttttatagttttaatgttttagttttttttggtttttaggtatggtgtgtttttgtgttgtgttgttgttgtttgagtatttttgtttgttttttttatttttagggtagttggtggttgtgggagtgtttttggtaggtagttggggtaatttagtgttgggtttggtgtaatagtttttagtggatttgatgaggagtgtgttgggtttggaaaatttgttaaggtggagtatggtgtggtgttggttgtggggtgtttggggttttgtttgttgggtttgggggtgtgtgggtggtggggaggttggtggtaggggttttttgtagtgtatagatttatgggtgttgggtttttggttttgggtatttatttttgggaaaggagttggggagttgtggtgtttttgtttgtttgtattggttttgggtggtggttttttgtttttttaaagtgttgttgggtttttttagtttatagtttttttatttatatagttgtggtggtgttggttttgggtttttgattttttgggttattgttattttgggaggttttggttttgttgttgtgatgtaaatgtttaaatatggatataggatgtgtgttggggattttgaaaaggaaagtttgagttgtgatgttgttgttgttgttgttgttgttaggtttgtgttgttgtgtgtgtgtgtgttttttaggtgtggagtgttggggttgtggatgtgttagtttggggtgttgtgttttattgggttgattgtttggtagatgtgttttttatttggaggtagaggttgaggggtagtaggggaggattgtgttgggtttgaatttgttttttgttattaattagtttgatatttagttttttttaatgttagttttttatttgtgtattttttgtggagagaaattgagagtatataaatgtttaggtgtatttagtaaattatagagattattgttatttattttttttgtttatgtttgtgtgtttttttattttaagttttttttttttaaatttgtgttaggaaaaataatttaaattaaaaaggattgtaatatttgttaatagtaggaggaaagttaattagtataatagggtatattttaaattgaaaagtaaaagttttttttttttatttattttatttttagtttttgaggtagttatatttaagttttttgggtatttttttagaagaatttatgtatatttaattatatatattgttttgtaatattattattattattatttttttatttgaaataatttagagattgtgttatgttttgatataaagattttgttatttttttttaaggttgtatagtattttattgtaagggaggattttgagttagttgatttattttttatttatgagtatgtaggtagtttttaattttttatttatattaatgttgttggagttaatatttttgattatataaatgtgaatgtgtttgtgagataaattttaatgagtgtaattgtgtgttaaagtatatgtaaaattttgatagataattgta

SEQ ID NO: 293 - DNA, 11147 bp, Artificial Sequence
  chemically treated genomic DNA (Homo sapiens)
gtggaatatattttttatatagttatattatttaaaatttattgtttttaagtttttatttaaatgtttttttgtgaagttatttttgagttttttttaaaattgtagttttttatttttgtattttttattgttttttatttttaatttttgttattgtagttagaattatttgatatatagtttttattttattggttttttgttatgtttttttttataagaatttgaagtttattaggttgggagttttgtttgttgtgtttgttgttattttttagtgtttaaaattgtttggtatatagtaggtatttaataatttttgaattagtgaaaattagatggtggtttggtatttttatataggaatgagttaggtggaaattatttaggatataagtagattttgaagtgataaggaagggttattataattatgtggggtttattttgtttttttttgttttttttttttaggtttagtaatagttttattaaggattttatgaatattaaagtttatatttatatgttgttagaggtgagagtagtttattttattattagattttgtgtttagggtggtgatttgaagaaggaagagagtgaaagaagggaaggattatttttttttttaaattggagttaagggagggaggttagagtaagtttgggggtgtaatttagatttagtttttgtttaattttttttgtttttttttttaggggtttagagaattataaggtttgtagaattttttagagaagttttattattgattttttttttttatttttagatattaaagagtttgaatgtttttgagttatatggtttttttttttttttataaattttgttagttgttatgggggtttgtttttagggtataaagttattgagagatttagagatttagtttttttgtggaatttttaaaatgttttagtagttttgtttttagtttgttgtttggtagtatttgttagttgattttatgtattgtttttttttttgttattttggtaatttgggttttttattttatttttttttttatttttttttttagatgttattttttgaattgttatagagaatgggttaatttatggtggaggtttgtttatttttataataattaaagggttttaaggtttatgtttttatatatttaattattttttaggtattttaaattatatttaaattttaatttagttttattttgttttagtttttgtttgtaagtgttttagtttttaatgggtatagatttggattttgttttttttagttgggtttttattttaggttgagtttagttattgttaattaatgtagagttaggttttttttttttttaattttggttgtagtttaattttgttttttgaaagtattttgtttttgttatttaatgtttttttgtgtgtttgatagttattttgtttttttatttttgttgtgttttaaatttgtttttatttagttttatggttttgtttaattgtagagttgttttgtttgtttatgtggagtttagtttgatttatttttgttggttgttatgtttatttttatataagttttgtttttgttgagtagtatggtgtgtgatattgtttttttggtgttttggtaggggtttagaagttttttgtttgttaattagagaaaaatagggttatttatttttgtttttgggggttgttttttattaattttatgtaagttaattagtgtgaggtagatttttgtttttttgatataggttttgagtttttttagttgtttatagtttgttagtttttgagttaattggtgtggagtattgtgaaggttgaatgtgtttttttgggattttaggggttgtgagtgttttattatttttttttatgttaattatggtatagttttgtagggaagggtttgttttttaattttttgaggttttgtggttgattaatagtgttttggttaattagtgagtggtgggatattgggttttttttttttgggtttatgtgagttgtagggaaatgtaggggtggtttttaggtgttgttgttgttattgttattattatttttattgttgttttggaatttaggtttggggggtggtggggttgtgtatggagtttttgttttttggagttgttaatattgttaatgttattgttatgttatatataggtgagttttgggtttggagggtggagggtttagtttgtgattttatgtattttttttgtttttgtgtagaggatgtggtttggttggtggtttgttggtgtttgattttttgttgttattattatggttggtggatttgtgtgtggtattgtttaagttttttgttttttatagtggatttgattgtggtttaattttttttttttgttgtataatggattggtttgtgtgtttatgtttttttttatgttaatttagggtggatttgtttataggttttttttttatttttatttttatttgttttttatttatttttatttatagggagttagtttgtgatagtgtttagtttttttaatagtaggtgtatttgagtgtttggattttttttagttttaatttttaggagatttgtttgtggttttatttattttattttttttgtatattgtagtgaattaatttgtggtgttgtatttttttgtatttttttttaatagtgagtttatttgagtttgtatttttgttttttttagttttttaatgtattagtttatggttttttttaaaattattttttttttttattattattattattattttatagtggattagtttttatgtttggatttatgtttttttagttattagtttattgttttgtttttttttttttgtagattgttgttttagtgtttggggtttttttttttttaatagtgggttagtttagtgttttatatttttttatttttagtagtttagtttatagttttttttttttttgttttgaattagtttgtgtgatggtttttttttttttttattgtggtgtaggagtttgtaaggttttttgttttttttttttttagatgatgagttttattatttttttttttgtagtggatttgtttattggttttttttttttatatttttgtatgtttgtatagttttttgtatatttttttgtgagtttagtgttttgtaattgggggaagattggttgtgtatttttaatttttttttttttttttttttttttttagaagagaatgtgttgatttttttttttttgtgatggagtattgtatggttttttttgttttttattttttaatagtgggttagtttggttatatttgtaattataaagatgttttgttttattataataagtgaatatattagtgttagtgatgatagtaatgttaataggagttagtgtttattgagtatttgttgtatattaggtagagtgttttatatgaatgagtttttttaatttttattataattttatgagataggtagtgagggaattgggttatagggaggttaaattttttatttaaaggtggtttaggaagtatttaggatataggataatttttgaggttttttttttagattttattttattttatgtgaggttttagtttttaaaaattaaattagtttttatttttaagtttttgtttttgttgttttttttgtttgtagagtagtttttattttttatttttttttagtatttatttattttttaattttagtagttgtgtgattttagatgagtgatttaattattttttttttgtgtttttttttttatttgtgaaatgggggattagaattagaattttttttagtgtaaataaatattaattgtgaattaatggtaaaataagtaatttttttagtattattgtttatatttttttatttttttattgtgttttaattatattggttttattatatagttttttaaatatagtaggtatgggttagttttagggtttttgtattggttgttttttgtgttttgaatattatttttagatttttgtatggttttttttagtattttgtttaaatattaatttttaaaggatgtttattatattgtggtgtgtggaatgtagtataaaaagatatatgtatgaaagatgtttttaagaatgttagtttatatatgagtaagggttttttttttttttaaaaggatgtgtttataagattgaggtatgtaatatgttttgtaaaggtataggtataaaagttgtttttaagagtgttagttgtatatgtgaataaggattgtgttgttgtattgaaagaatgtgtttataaaattgtggtgtgtagttgggtataggggtgtgtatttatagttttagttatttgggaggttgaggtgggaggatagtttgagtttaggagttttaggttagtttgggtaatatagtgagatttttttttttgaaaaaaaaaaatttaaaaaataattattgtggtgtgtgtaatatatttttttaaaggtataggtgtaaaagatgtttttaagagtgatttgattttgttgtatttgggtagtgttattttattaaaggttgattgttatattatggtatttagaatatattatataaaggtatatgtataaaaaagaagtttttaataatgttatttgtaaaaataaaaaaagttaatttttttttgattatttgaagttgtatatttagtagggtttaagttaggtttttgatttgttttgttgttttttattattgtttgatatattgtgtgggttatttgtttgttgtttgtttttttttattagaatgtgagttttatgaggatttagtttttgtttgtttatttattgttatgtttttagtaattgaaaatgtattaggtaaatagtagatgtttaataagaatttattttatgaataaatgggaaaaagataatttgagatattagtgtaggggttatatgaggaagaagaagggatatgagagttaattagttgggattgtttttgtaattaatttttattgagttttttgtgagtattaggtatttttttaggtgttggaatatggtaaggaatgaaatagggtgaaatatttgtgtttgtggagttgatatttattaaaagttggggaggttgggtatggtggttaatattagtaattttagtattttgggaggttgaggtgggtggattgtttgagtttaggagtttaagattagtttgggtattatggtgaaattttatttttattaaaatataaaaaaattagttgggtgtggtggtgtgtgtttgtaattttagttatttgggaggttgaggtaggagaattgtttgaatttaggaggtggaggttgtagtgagttaagattgtattatgtattttagtatgggtgatagagtgagattttgttttaaaaaaaaaaaaaaaaaaatttaagttggggagatagattatgtgaataaaataaataagtaaaattagtataatagataaatgttgagaagaaataatgaaatagggtaggtaggaattgagtattgggggtggttgaaattttaggtatagggaaggtgatttttgaattagggttttatggtagagatggagagagttttaatgtttatgggaagagtatattaggtagaaggaagtgttagtttagaggttttgaggtgggatggtgtttgttatgtttaaggaatattaaggtggttagtgtggttggagtagagtgtggggaagggtagaaggtgaggttatataggtgatgggagttagatagtgtaggtgatatataggataggattgtaggggtagggggagaaggatgatatattagttaatagttaatatttgtggagtatttgttatatattagaggtatttttttgtttaaatattaatttttaaaggatgtttattatatggtggtgtttggaatgtattataaaaagatatatgtgttaaagatatttttaagaatgttagtttatatatgaataaggattttttttttttttaaaaggatatgtttataaaattgaggtatgtaatatgttttatggaggtataggtataaaagttgtttttaagagtgttagttgtatatgtgaataaggattgtgttgttgtattgaaagaatgtgtttataaaattgtggtgtatagttgggtatagaggttgaggtgggaggattatttgagtttaggagttttaggttagtttgtgtaatatagtgagatttttgtttttgaaaaaaaatttaaaaaataattattgtggtgtgtataatatatttttttaaaggtataggtataaaagatgtttttaagagtgatttgattttttggtatttgggtagtgttattttagtaaatatttattgttaaatattatggtgtttggaatatattatataaaggtatatgtataaaaaagaagtttttaataatgttatttgtaaaaataaaaaaaaaagttaattttttaagttttttatagaagtattttatagaattgatatagttaatttttatagaagttttggagggtaggtgtatttttgagaatatttgattttgagagtaaaatatttttattttatagatgaggaaataagtaaagagaggttgagtaatttgtttagggtaattttgagttagaatagttagaataggggtagaggaatataaggttgaagatttagaaagaagaatagatttgtaagggtaggtaggttatttggtatttttgattatgtagaggaagaatgaattttttttggaatgtgatgattgtgtaattgagtttatgaagtgagggaagagttttttttgtggggagagtagtttgtgtttatttttagaggttggaattgttttgggaatggtagatagtttagggtggttgttttagagtttttgtatatgttgtttgttttgtttgaaggtttttttttatagagggtagtttggtttgttatttttttttttttaggttaggtgttatttttttggggaagaattttttgtatattttgtgtaaaaatagtatttttgttattttttaggattttatttttttttgtttttttttatggagaattggtggtgtaaggtgattgtttattagagttaaattatttaggttttgaattttggttttgttaatttttagttgtgtgatttggggtaggttatttttttgtatttttattgttttatgtggaaaatgggggaaatgataatttttattttttaatggtggtttgaggatttaatgagttaaatgatttaaagagtgtgtagtttatggtaaggattgtatgtttggtttgtatttttaaattattaaaatgtatttatagtatatttgtagatgtttgataggtttttgaaattgattatttttaaaattggtgtgattttttttaaaatttatttttttgtaaggtttttattttagttgattataatgttgtttttgtgggtgattaggttataaatttagatttattttggattttttttttattttttttgggtatgttatttgttagtaagttttattttgtgtttaggttttttttagattttagttattttttgttagttttattgttattattattatttattgtagtggtttttttagttttaatagtttgttttttttataattgttagggggattttgttgaaattttagttatagtttgttatttttttgtttataatttttttgtggtttttgttttatttaatattttgatagtatttgaaaaagtttggtttagtttggtttttgttattttgttttttttttttgttgtttttttttttttttttgaatttatgttagttttttttttttatgttatttgttaggtattttttagttttgggttttttatattggttgttgtttttatttggtttgttgtttttagatatttatgagtttagtttttttatttttttttggtttttgtttagttgttttttttttggtgattatttttttttgattttttatgtaaaagtaatagtttttttttgtttgattttttttttataatttttattattatttgatgtatttttgtatatgtttgtttttttttttatttgttttttttgttaagatgtgagtttttttggagtagggattgttgtttgttgtgtttttgattgtatttgtagtatttggtttatagtatgtatttattaaatgtttgttaagtgaaggagatggaaagaagtaaatatatttaagtaaggtagattattagaatttttatgaggggttaagtgggagaaataataaaatataaagttttgtgtgttgttgaagttggaagtttattgttattttttatttagttgataggttttgttgtagttgaaagaagaattggtaaaattgtttgtttttgttattaggagttattttgaattttttggatttttgaaataagtttgtttgtaaaataaatttagtgaggtttttggtgataggattttttaattggatattttatggttttgtgatttgtataattgaataggaagtttatgtttatttttagtttgtttttaggaaagaaagtagtaatggggtgatagggaggattttgttttttgaaggatatgttgagagggaatagttggtgtgaggggttgtttagtttaatggtgaaatgtttagttaattggaatttgattgtttggttttaaatgttggttttgttatatgtggtttgtggaaggtatgtagatatttgtgtttttgttgttttatttataagttaatgataggaagattatttattttttagaggtatgattagggataaataagttaatgtttattaaaaaaaaaaataatagtataggtgtatatgtttttatttaaaatttttggggttagatgtgttttagaatttttatttttttatattttagaaaggtaatatgatgtatatatgatgttatataatattttttagtaagttttgtaattggttgtgtttatatttttgtagtaaaatgtatgaatatttgtaataagtgagatttaataaagattagaaagggttttgttttattttaaattaggttttgttattaaaagagttaaaagaagttttttgtttttagagtattttggatgttggaatggtagataagggattatgaataaattagaaattaatatttagagtttattatatattttaggtatataatatttaatttgtataatatttttgtgaattaggtattgttatttttattttattaatgggtatattattatttttgttttatatatgagaaaattgaggtataaagaggttaaagaatattagttaagtgtggtgttttatgtttgtaattttagtattttaggaggttagggagagaggattgtttgagtttaggagtttaagaatagtttgggtaatatagtgagattttattttttaaaaaaagaaaaagaatatgtttagggttatatagttaataagtggtagaattaggatttaaatattggtaatttggttttagtgtttgggtagttgtttagtaggttatattgtttttttgtttagaagagtgtttgatgtgtattaagtttttaatagatgttaattattgttgttattaagaaagagaatatttagggttgagtatggtattttatatttgtaattttagtattttgggaagttaaggtgggaggtgggtggattatttgaggttaggagtttaagattagtttggttaatatggtgaaattatgtttttattaaaaatataaaaattagttgggtgtggttgtgggtatttgtaattttagttatgtgggaggttgaggtatgagaattgtttgaatttgggaggtagaggttgtagtgagttaagattgtgttattatattgtgttttagtttgggtaatagagagagattttattttaaaaaaaaagaaaaaaaaaaaaagaatgagaatatttagggatagtaataggatagagagattaggtatttatttagttttaggatggttttataaaggaaaggatttttgggttgggatttgaaagataagaaagattgttaggtgaaagaaggaagttttatgtggagtgagtagtttttgtaagggtttggtaaaaaaaaaattttttgaaaaatttgatattgatatggtagaagatatagataatatttaaatgaggaggatggaattagttttttatttttgttgtaataaataattataaatttagttgtttaaaataatatatttgttattttatagttttgtaggttagaagttttatattggttttagttgaaattaaggtattggtagggttgtgttttttttggaggttttaggggaaaatttattttttgtttatttaagttgttggtagaatttaattttttgagattgtaggattgaagtttttgtttttttattgtttgttagttgatagttatttttagttttaagaggttgtttatagtttttgattttgagttttttttttttatttttaaagttaataatggtaggttgagttttttttatattttgaattttttttgttttttttgttattatatttttgagttatttttttttttttattatttgttttttagagtttatatgattagattgaattttattaaataatttagaaataatttttttgttttagggtttgtaattttaattttatttgtaaagtttttttttgttatgtagtgtaaataatatataggttttgaggattaggatgtggagtagggttggtattatttggtttattatagtttgttttttgatttttatagatttatatttgttttatatttaaaatatatttatattattttaagatatttatgagttgtattttattatagggagtattttaagtaagattggggagttagaagttagtttgggaaggtttagggaatgatggtagggtttgaagatagagatggagaaaagatgataaaaaaaggaattttttttttgttgatttttgttttttttatgtttatagttttttaatttagttgtttgttttttagg

SEQ ID NO: 294 - DNA, 11147 bp, Artificial Sequence
  chemically treated genomic DNA (Homo sapiens)
tttggagagtaaatagttgagttgagaggttgtggatataggaggggtagaggttagtgggaggaggatttttttttttgttattttttttttatttttgtttttaaattttattattattttttaaatttttttagattaatttttagttttttagttttgtttgggatgttttttgtgatgggatataatttatgggtattttaggatggtgtgaatgtattttgaatgtgaaataaatgtgaatttgtgggggttagagggtagattgtggtaggttaaatgatgttaattttgttttgtattttaatttttggaatttgtatgttatttatattatatagtagaaaggaattttgtagatgaaattaaggttataaattttaagatagggagattatttttggattatttgatgaaatttaatttaattatatgagttttgaaaagtagatgatggagaaagaaaggtagtttagagatgtgatgatagaagaggtaggggagatttaaaatgtgagagggatttaatttgttattgttggttttgaagatggaggaaggaggtttagaattaaggattgtgggtagttttttaaagttgggaatggttgttagttgatagatagtaaggaaatagggattttagttttataattttaaggaattggattttgttaataatttgaatgagtaggaaatggatttttttttagagtttttagaaggaatgtaattttgttaatattttgattttagttgagattagtgtgggatttttgatttatagaattgtaagataataaatgtgttgttttaagtagttaaatttgtgattatttgttatagtaagaatagaaaattagttttattttttttatttgaatattatttgtattttttattatattaatgttaagttttttaggaggttttttttttgttagatttttgtaaaggttgtttattttatgtggggttttttttttttgtttagtagttttttttattttttaagttttagtttaaaggtttttttttttatgaagttgttttaaaattgaatgaatgtttgatttttttgttttgttattgtttttgaatgtttttgttttttttttttttttttttttttttgagatggagtttttttttgttgtttaggttggagtgtagtatagtggtataattttgatttattgtaatttttgttttttaggtttaagtgatttttatgttttagttttttgtatagttgggattataggtatttatgattatgtttggttaatttttgtatttttagtagagatatggttttattatgttggttagattggttttgaatttttgattttaagtgatttatttattttttattttggttttttaaagtgttaggattataggtgtgagatattgtgtttggttttgaatatttttttttttgatgatagtaataattaatatttattgagagtttaatatatattaggtatttttttaagtagagaggtaatatggtttgttggataattgtttaggtattagggttagattgttagtgtttgaattttggttttgttatttattagttgtgtgattttgggtatattttttttttttttttaagaaatggggttttattatgttgtttaggttgtttttgaatttttgggtttaagtaattttttttttttggttttttaaagtgttaggattataggtatgaggtattatgtttggttgatattttttaatttttttgtattttaatttttttatgtgtaaaatagggataatgatatgtttattagtaaaatggggataataatatttagtttatagagatattgtatagattaaatattatatgtttgaggtgtatgataagttttaaatattagtttttgatttgtttatagttttttatttgttattttaatatttaaaatgttttaagggtagaaagttttttttaatttttttggtggtaaaatttgatttgaaatgaaataaggttttttttggtttttattgaattttatttattgtgagtgtttatatattttgttgtagaaatatgaatatagttgattatagagtttattaaggggtgttatgtaatattgtatatgtattatgttatttttttgaaatgtgaagaaatggaaattttgaaatatatttggttttaggggttttgggtaagggtatgtatatttgtattgttatttttttttttaatgggtattgatttatttatttttgattatgtttttgagaagtaggtagtttttttgttattaatttataaatgaggtagtggaggtataaatgtttatgtattttttataggttatatgtggtaaagttagtatttggagttaggtagttaggttttagttgattaagtattttattattaggttaaatggttttttatattgattatttttttttagtatgttttttaaagaataggattttttttgttattttattattgtttttttttttgagagtaaattggaaataaatatgagttttttgtttaattatataagttataaagttatgaagtgtttgattagagagttttgttattagagattttattgaatttgttttgtaggtaggtttgttttagaagtttaaagagtttagagtgatttttggtggtaaagataggtaattttattagttttttttttagttgtaatagaatttattagttgagtgaaaggtgatggtgggtttttagttttaatagtatatagggttttgtattttgttattttttttatttgattttttataagagttttagtaatttgttttgtttagatatgtttatttttttttattttttttatttagtaagtatttggtgagtgtatattgtgggttaggtgttgtggatatagttgagaatgtaatagataataatttttgttttagaggagtttatattttagtaggaaaggtagatgagaaaaaaggtaaatatgtataagagtgtgttagatggtggtaagggttatgggaaaaaaattaagtaggggagagttgttatttttatatggagagttaggggagagtagttgttaaggaggggataattgggtagagattaaaaggaggtgaaggaattgagtttgtgagtatttgagagtagtaagttaggtggaagtggtagttggtgtgaagggtttaaggttggagagtgtttggtaggtgatatggggagaggaggttgatatgggtttgggggagaggagggaggtagtgggagaggagaatagagtgatgggggttagattgagttaggtttttttgggtgttgttaggatgttgagtgagataggagttataagagggttgtgaatagagggatgataggttgtgattgagattttaataggatttttttggtggttgtgagaagaatagattgttggggttgaagaagttattgtggtagatgatggtggtagtagtggggttggtgagaagtagttggggtttggagaaagtttgaatatagaataggatttgttgatagatagtatgtttgggggaggtgagagaagggtttagggtgagtttaggtttgtggtttaattatttataaagatagtattgtggttagttgaggtgggagttttgtaggagagtaagttttgaggggggttatattagttttggagatggttagttttagaggtttgttagatatttatgggtatgttatgaatatattttaataatttaaaaatgtaagttaggtatatgatttttattgtgggttgtatattttttgaattatttaatttattgaatttttaaattattgttaaagggtggggattattattttttttattttttatatgaggtaatggaggtatagagaagtaatttgttttaagttatatagttggaagttggtagagttggaatttaaaatttaagtggtttggttttagtgagtaattgttttatattattagttttttatgaagagaaatagagaagggtaagattttagagagtgataggaatgttgtttttatatagggtgtataaggagtttttttttaaggaagtgatatttggtttgaaggaggggaggtagtaagttaggttgttttttgtgggggagggtttttaggtggagtgaatggtgtgtataaaggttttgaggtagttattttgaattatttattgtttttgagatagttttaatttttgagggtaagtatgggttgttttttttgtagggagagttttttttttattttatggatttaattatataattattgtattttaggaagaatttattttttttttgtgtgattaaaggtgttaaataatttgtttgtttttgtaaatttgtttttttttttgagtttttagttttatgtttttttgtttttgttttggttattttggtttaaggttattttgagtaagttatttagtttttttttgtttgtttttttatttgtaaaatggggatattttatttttaaagttaaatatttttaaaagtatatttattttttaaggtttttgtgaggattaattgtgttaattttgtaaaatatttttgtaaaagatttgaggggttgatttttttttttgtttttataagtagtattgttaggaattttttttttatatatgtgtttttgtatagtatattttaagtattatagtgtttaataatgaatatttattgaaataatattatttaggtgttagaaaattaaattatttttagaaatattttttatgtttgtgtttttaggagagtgtattatgtatattatagtggttattttttgggtttttttttggagatggggattttattatgttgtataggttggtttggaatttttgggtttaagtgatttttttattttagtttttgtgtttagttatatattatagttttgtgaatatatttttttaatgtaataatatagtttttatttatatatataattagtatttttagaaatagtttttatatttgtgtttttatagagtatattatatattttagttttgtgaatatatttttttgaaaaggaggaaaatttttatttatatataaattggtatttttagaaatatttttgatatatgtatttttttgtagtgtattttaggtattattgtgtggtaaatattttttgggggttggtatttgaatagaaaagtgtttttgatgtgtggtagatattttatagatattagttattagttagtgtgttatttttttttttttgtttttgtaattttattttatgtattatttgtattatttggtttttattatttgtgtgattttattttttatttttttttgtattttgttttagttatattggttgttttgatgttttttgaatatggtaggtattattttattttagggtttttgaattggtatttttttttgtttggtatgttttttttgtagatattaaggttttttttgtttttattgtgaggttttaatttaagagttattttttttatgtttaagattttaattatttttaatatttgatttttatttgttttattttattatttttttttagtatttgtttattatgttaattttatttatttattttgtttatatagtttgtttttttagtttgggtttttttttttttttttttgagatagagttttgttttgttatttatgttggagtgtatggtgtaattttggtttattgtaatttttgttttttgggtttaagtaatttttttgttttagttttttaagtaattgggattataggtgtatgttgttatatttagttaatttttttgtattttagtagagatggggttttattgtgatgtttaggttggttttgaatttttgagtttaggtaatttatttattttagttttttaaagtgttaggattattggtgttagttattgtgtttagtttttttaatttttaataaatgttagttttataagtataaatattttgttttgttttgttttttgttatattttagtatttagaagagtgtttggtatttataaggggtttagtaaaggttggttgtaggaatagttttaattaattagtttttatattttttttttttttttatgtgatttttatattggtgttttaaattattttttttttatttatttatgggataaatttttattgagtatttgttgtttatttggtatatttttagttgttggagatatagtggtgaatgagtagataaaaattgagtttttatgggatttatattttaatgaggagagatagataataaataagtaatttatatagtgtgttagatagtgataaagggtaatgggataaattagggatttggtttgagttttgttgggtgtgtagttttagatggttagggaggggttgattttttttgtttttataagtagtattgttaggaattttttttttatatatgtgtttttgtatagtatattttaagtattatggtgtgataattaatttttaatgaaataatattatttaggtataataaaattaaattatttttagaaatattttttatgtttgtgtttttaagagagtgtattatatatattatagtggttgttttttgggttttttttttttagaaaaagggattttgttatattgtttaggttggtttggaatttttgggtttaagttatttttttattttagttttttgagtagttgggattataagtgtatatttttgtgtttagttatatattatagttttgtgaatatatttttttaatgtaataatatagtttttatttatatatataattagtatttttagaaatagtttttatatttatgtttttatagagtatattatgtattttagttttgtgaatatatttttttgaaaaggaggaaaatttttatttatatataaattggtatttttagaaatattttttatatatgtatttttttatattgtattttatatattatagtgtggtaaatattttttgggggttggtatttgaatagagtgttgaaaggaattatgtagagatttgggggtggtgtttaaggtataaagaatagttaatgtaaaggttttgaggttggtttatgtttgttatgtttgaggagttgtgtggtggaattagtgtggttggagtatagtaagggggtgggaaggtataggtggtaatgttagaaaggttatttgttttattattaatttatagttaatatttatttatattggaagggattttagttttgattttttattttataaatgaagaaaaaggtatagagaggaagtggttaaattatttatttaaggttatatagttgttgggattggggggtgggtgggtgttgagagaaggtgaggaatgaagattgttttgtaggtagagggaatagtaagaataaaagtttggaggtgagaattaatttggtttttaaggattgaggttttatgtggggtgggatgagatttaagaggggagttttaaaaattattttgtgttttgagtattttttgggttatttttgagtaaggaatttaatttttttatggtttaatttttttattatttattttatggggttgtggtgaggattaaaggaatttatttatatgaaatattttgtttgatatatggtaggtgtttaataaatgttagtttttattggtattattattattattggtgttaatgtatttatttattgtagtgaggtagaatgtttttgtggttatgagtgtgattaggttgatttattattaagaggtggaggatagggaaggttgtatagtgttttattataaggaaaagaggattagtatgtttttttttgggaagggaaaaaaaaagagaaggaaattgaaagtatatggttgatttttttttaattataaagtattggatttatgggagggtatgtgggggattgtgtaagtatataggggtgtgggggaggaaggttaatgaatagatttattgtaaagggaggggtgatgaggtttattgtttgaggggaaggggagtagaaaattttatagatttttgtattatagtgagaggagagaaaagttattatatagattgatttaaagtagagagggaaaaggttatggattgagttattgaaaatagggagatgtaaagtattaaattaatttattattaaaaaggagagaattttaagtgttagagtgatagtttatgaaaaagaggagatagggtaatggattgatagttaaagggatgtgaatttaaatatgaagattgatttattataaaatggtggtggtggtggtggggggggggggtggttttgaaaaaagttatggattgatgtattgggggattggaggaggtaggaatataaatttaggtagatttattgttaaagagggatgtggaggagtgtggtgttatggattgatttgttatgatgtataggaagggtggaataaataaggttatggatgggttttttgaaagttgaggttaggagaaatttaaatatttagatatatttattattaagggggttgaatattgttataggttagttttttataagtgggggtgggtggggggtgggtgggggtaggggtagggggaaagtttatggatgagtttattttaagttggtgtggggaaaaatataagtatgtagattgatttattatataatgggagggggaggttaggttatggttagatttattataagggatgaagggtttgagtaatgttatatgtaggtttattagttgtggtggtggtggtggggagttgaatattagtaggttattggttaagttatattttttgtgtgggggtgggaaggatatgtggggttatggattgggttttttattttttaggtttagagtttatttgtgtgtagtgtggtggtggtgttggtaatgttggtagttttggggggtgggggttttatatgtggttttattgttttttaggtttgggttttgaggtggtggtggaggtggtggtggtggtggtggtggtagtatttagaagttgtttttgtgtttttttatagtttatgtgggtttgaggaggaggagtttaatgttttgttgtttgttgattggttaaagtgttattaattggttgtaaggttttgaggggttgggggatgggtttttttttatagagttgtgttgtgattggtgtaaggggaaatgatggaatgtttatggtttttggagttttgaggaggtgtgtttggtttttatggtgttttatgttgattggtttaaggattgatggattgtgagtaattgaaaaggtttggggtttgtgttgggggggtgggggtttgttttatattgattggtttatatgggattgatggaagatagtttttaaggatgggggtgggtggttttgtttttttttgattggtggatgagggatttttagatttttgttaaaatattaagggggtggtgttgtatgttatgttgtttagtggaagtagggtttgtatagaaatgggtgtagtagttggtgggagtgggttggattgggttttgtgtaggtgggtagggtagttttatggttagataagattatagagttgggtaaagatgaatttagaatatagtggaggtaggagggtaggatggttgttaggtatatgaaagagtattgagtggtagaaatgaaatgtttttagagggtagggttgaattgtggttagagttaaaaaggggaggaatttggttttgtattgattggtggtggttggatttaatttagaataggggtttgattagggagagtgggatttaggtttgtgtttattggaagttggaatatttataagtaggggttaagataaggtagggttgagttagggtttgggtgtaatttggggtatttggggaatgattgggtgtgtgaaagtgtaaattttagggttttttgattgttgtgggaatgaataaatttttattatgaattggtttattttttatggtaatttaaagggtggtgtttaggaaaaggaatggaagaaagggtgaggtggggggtttaggttgttaagatgatagaagagagggtagtgtataaggttaattggtaaatattgttaggtaataggttggaggtaggattgttggggtattttggaggttttatagagagattggatttttgggttttttagtaattttgtgttttaggaataggtttttgtggtaattagtagggtttatggggaaaaagaagggttatgtgatttaaaggtatttaggttttttaatgtttgaggatggggggaagaagttaatggtgaggtttttttgggaaattttgtaggttttgtagttttttaagtttttgaaaaagaggatagaagagattgaataaagattgggtttgggttatgtttttaggtttgttttgattttttttttttgattttagtttagagggaaagatggtttttttttttttttgtttttttttttttttaggttattattttaaatatagagtttggtagtggggtgagttgtttttatttttagtaatatgtggatatgggttttgatatttatggagtttttggtgaggttgttgttgagtttagagaaaagaaataagaaagggtaaaatgggttttatatgattatgatgatttttttttattattttaagatttatttatattttggatgatttttatttggtttatttttatgtggaaatgttaagttattatttggtttttattgatttaaagattattaaatgtttattgtatgttaggtaattttaggtattgggagatagtagtaaatataataaataaaatttttggtttgatggattttaaatttttgtaaagaaagatataataaaaaattaatggaataaaagttatgtgttagatggttttaattataataataaaaattaaaaatgagagataataaggagtataggagtggggggttgtaattttaaagagggtttagggatggttttatggagaagtatttgagtaaagatttaaagatagtgaattttgagtagtgtggttatatggaggatgtgttttat

SEQ ID NO: 295 - DNA, 3814 bp, Artificial Sequence
  chemically treated genomic DNA (Homo sapiens)
ttttttattttttattgttatttatttagtgttgtgtagtagtttagttgtgtgtttgttgggaggggttgttaagtgttttgtttattggttgttttttgaatttttgttattttatgtataaatatatttatatattttttttgtttagtttatatattgagttatttgtatatgtgagtatatttttttttttttttttatttttttggtttttgatttttataagtttatggaatatttttggaaagatgtttttgatttagtagggtaggtttgttttgatttttttttttgtagttttagtattttgagaaagtaatttatttttttggttagtgtttgtattttagtagggagatgaggattgttgttttttatgggggtatgtgtgtgtttttttttttttttaggatttgtaggattttttgtgttatttgtatataatttggtaggtttatattttttaagagttttatgaagtgttttttgtatgtgttttaaaaaggtatttgaaaattgaaagtgtgatttatggaaattaaattatttgtaaaaaattgttttggaaagtaatgattgttggttataaagggaaatatttgtgatgtatttaatgtgtttttaattttttatttgttgataatttatagttattaatgttaaatttgattttggttttagttatatttgtatattgtttaataatggtttatttttgtaagaattagataaaatgtatatttgatataaaatagttaaaaatgtaatttttagtaatagtaagtttggtatttagatagattatgaatattttgttagatattttgttgggtgtttgggatagtaattaaaataaagtattgatagttgtattagagtttattaggttgtagtaaaggaagtttatttaaaagtataaattatttaagattatagatgtatgatatattttatttattttttgtttttttaatatgtatatatatatatatatatatatatatatatatatatgtgtgtgtgtatgtgtgtgtgtatgtttaatttttaatttagttaaaaatttttttttatttgttttttatttggatatttgattttgtatattttagtttaagtgaattgagaagattgagttgtaggattaaaggatagatatgtagaaatgtattttaaaaatttgttagttggattagattgataatgtaatataattgttaaagttttggtttgtgatttgaggttatgtttggtatgaaaaggttatattttatatttagttttttgaagttttggttgtataattaatttgtggaaggtatgaatatttatgtgtgttttaattaaaggtttttttgaattattttttatatgagaatttttaatgggattaagtatagtattgtggtttaatataaatatataagttaggttgagagaattttagaaggttgtggaagggtttatttattttgggagtattttgtagaggaagaaattgaggttttggtaggttgtatttttttgatggtaaaatgtagttttttttatatgtatattttgaatttttgtttttttttttttagatgttttttgttagtttttttagttgttaaatatagttgtttgtggttggttgtgtatgtaattgtatattttattttatttgttttattttggttatagtgtagttttttttagggttattttatgtatatattatgtatttttagttaatgaggagggggaattaaatagaaagagagataaatagagatatattggagtttggtatggggtatataaggtagtatattagagaaagttggtttttggatttgttttttgtgtttattttaagtttagttttttttgggttatttttagtagatttttgtgtgtttttgttttttggttgtgaaatttagtttttatttagtagtgatgataagtaaagtaaagtttagggaagttgttttttgggattgttttaaattgagttgtgtttggagtgatgtttaagttaatgttagggtaaggtaatagtttttggttgttttttagtatttttgtaatgtatatgagtttgggagattagtatttaaagttggaggtttgggagtttaggagttggtggagggtgtttgttttgggattgtatttgtttttgttgggttgtttggttttattggatttgtaggtttttggggtagggttggggttagagtttgtgtgttggtgggatatgtgttgtgttgtttttaattttgggttgtgttttttttttaggtggtttgttggtttttgagttttttgttttgtggggatatggtttgtattttgtttgtggttatggattatgattatgattttttatattaaagtatttgggatggttttattgtattagatttaagggaatgagttggagtttttgaattgtttgtagtttaagatttttttggagtggtttttgggtgaggtgtatttggatagtagtaagtttgttgtgtataattattttgagggtgttgtttatgagtttaatgttgtggttgttgttaatgtgtaggtttatggttagattggttttttttatggttttgggtttgaggttgtggtgtttggttttaatggtttggggggtttttttttatttaatagtgtgtttttgagtttgttgatgttattgtatttgttgttgtagttgttgttttttttgtagttttatggttagtaggtgttttattatttggagaatgagtttagtggttatatggtgtgtgaggttggtttgttggtattttataggtatttgtgtttgtgttgtttgttggggtggttgttgtgtttggtaggagggagggagggagggagggagaagggagagtttagggagttgtgggagttgtgggatgtgtgatttgagggtgtgtgtagggagtttggggtgtgtggtttagtttgggggttttgtgtgtagtttgtgttgtgtttagagttaagtttttttgttgggtagttgaaaaaaatgtattttttatttatttattgtttgtgtgagaggtagatttgaaagtttgggttttttaataaaatatatgttggaaaattagataaagtagtagttatttgtgggggaaaatatttttaggtaaataaatatggggtgttttgagttatttgggaaggttttgtttttggtatttaaagttgggggtgtttggagttagtagagtttagtagagttttatttatttttttaatgtttttgtttaatgtgttttttaaatttttttttatttagattatttgattggaaatatgttagttatgatgatgattttttgggaagtgatttttgttatttgttttttttttttttttattttatgttttggggttttagagagtgattgggagttgaatgggtttgattttggagttagttggttgagtttgtgttggagtggattgttggtatgtgatttttgatagttggaaatttgtaggtgttttgtgagtttaaaataagttatatggaagtataagtgtttaaaaataattttttgttagtttagtgataagtttgttttatttggggagaatgttttggagtggtgtgtgggttagttagggtttgtgttttgtagttattgtggaaggagtgtggttggtttaggatataggagattattttgtgattttaatggtgaaggttgtgtgtttttattttaatttttttttttataagaattgttttttttttttttttttttttttttatttttttttgtttagtttttttttt

SEQ ID NO: 296 - DNA, 3814 bp, Artificial Sequence
  chemically treated genomic DNA (Homo sapiens)
aaaggagaaattgggtaagagaaaatgggagggagaggagagggagaaagaataatttttgtagggaaaaaaattaaaatgaggatatataatttttgttattgaagttataaagtggttttttgtgttttggattggttgtgttttttttatagtggttgtgaggtgtagattttggttgatttgtatgttattttggggtattttttttgggtgggataggtttgttattgggttggtaggagattatttttaagtatttgtgtttttatatggtttgttttaaatttgtgggatatttataaatttttggttgttagaagttatatgttagtaatttgttttagtgtggatttagttagttaattttgaaattagatttatttaatttttaattgttttttaaagttttaggatgtggggtggggaggaggggaaagtgggtgataggaattgttttttagaaagttattattatagttgatatatttttaattaaatagtttagatgaaaggaaatttggggagtatattaaataaaaatattaaaaggataaataaaattttgttgagttttgttaattttaaatatttttaattttaaatgttaagagtgagatttttttaagtgatttaaagtgttttgtgtttatttgtttggaggtgtttttttttataaataattgttgttttgtttggttttttaatgtgtgttttgttaggaagtttgggtttttgggtttgttttttgtatggatggtaagtgggtggagagtatgttttttttagttgtttggtgagagaatttgattttgaatgtagtgtgggttgtatgtagaatttttgggttgggttgtgtgttttgggttttttgtgtgtatttttgggttgtgtgttttgtggtttttgtagttttttaggttttttttttttttttttttttttttttttttttgttgggtgtggtggttattttgatgggtggtgtgggtgtgggtatttgtagaatgttggtgggttggttttgtgtattgtgtagttgttgggtttgttttttaggtagtagggtatttgttggttgtggggttgtaggaaaggtgatagttgtggtggtgggtgtagtagtattagtgggtttggagatatgttgttgagtggggggaaattttttaggttgttggagttgaatgttgtagttttagatttggggttgtaggggaggttggtttgattgtagatttgtgtgttggtggtggttgtggtgttgaatttgtaggtggtgtttttggggtagttgtatatggtgggtttgttgttgtttaggtatattttgtttaggggttgttttagggggattttgagttgtggatggtttaggggttttagtttgtttttttggatttgatgtagtagggttattttagatgttttggtgtggagggttatggttatggtttgtggttgtgggtagggtgtagattgtgtttttgtagggtagaaggtttagaaattggtgggttatttggaaaaagagtatagtttgaggttagaggtgatgtagtgtatgttttgttgatatgtgagttttggttttggttttgttttgggagtttgtgggtttggtgaagttgggtgatttgatgggagtaagtgtagttttaggatgaatgttttttgttagtttttgggtttttgggtttttaattttaagtattggttttttgagtttatatgtattataaaggtgttggaggatggttagggattgttgttttgttttgatattggtttaaatattattttaggtataatttgatttggagtgattttaaagagtagtttttttgaattttattttatttgttgttgttgttggatagaggttgagttttatggttagggggtgggggtgtatgaggatttgttaaaggtggtttagggaagattgggtttaaaataaatgtgaaagatggatttaggggttggttttttttaatgtgttgttttatgtgttttgtgttagattttgatatatttttgtttgtttttttttttgtttgattttttttttttgttggttagaaatatgtagtgtgtatataggatgattttggggaggattatattgtaattgagatagggtagatagaatggggtgtgtggttgtatatgtagttagttatagatagttatatttagtagttgggggaattgatagggggtatttgaggggaagggggtggagatttagggtatatatataggaagagttgtattttgttattaggagaatgtaatttgttaggattttagtttttttttttgtaaaatgtttttaaagtagatagatttttttataattttttgagatttttttagtttgatttgtgtgtttatgttggattatagtattgtatttggttttattaggaatttttatgtgaaggatgatttagaaaaatttttggttagggtgtatatgggtgtttatgttttttataggttggttatgtaattaaaattttagaaaattgaatataaaatgtgatttttttatattaaatataattttaggttatgaattaaagttttggtaattatgttatattgttggtttggtttagttaatagatttttaaaatgtatttttgtatgtttattttttagttttataatttgatttttttggtttatttgggttaggatatgtagaattaaatatttagatgaaaaataaatagaaaaaagtttttaattgaattaaaagttaaatatgtatatgtatatatatatatatatatatgtgtatatatatatatatatatatatatatatatattaaggagataaaaaataggtgaagtatattatgtgtttataattttggatagtttatatttttgaataaattttttttgttgtagtttaatagattttgatataattattaatattttgttttaattgttattttaaatatttaatagagtatttgatgaagtgtttatggtttatttaaatgttaagtttattgttattaagagttatatttttgattattttatattaagtatatattttatttaatttttataaaaatagattattgttggataatatgtaaatgtagttgaagttaaaattgagtttagtattaatgattatagattgttagtaaataaagggttaaaaatatattaggtgtattgtagatatttttttttatggttagtaattattattttttaaagtaattttttatagatgatttaatttttataaattatatttttaatttttaaatgtttttttaaaatatatgtaaaaagtattttatagggtttttaaaaaatgtgaatttgttaaattatatgtaaatggtataaagaattttataagttttgaaagaaaaaggagatatatatatatttttatggagaatagtaatttttatttttttgttaggatatagatattagttagaaaggtaagttgtttttttaaaatgttaaagttatagagagagaaattaaaataagtttattttgttggattaagaatgtttttttagaaatgttttatgggtttgtagaagttaagggttgagagagtgagaaggaaggaaggaatgtgtttgtatgtgtgagtggtttagtgtgtgaattaggtagagagagtgtgtggatgtgtttgtgtgtggaatggtagggatttgggaagtagttagtaggtagggtatttggtagttttttttggtagatatgtagttgggttattgtatagtgttggatgaatggtagtggggagtgagggg

SEQ ID NO: 297 - DNA, 3050 bp, Artificial Sequence
  chemically treated genomic DNA (Homo sapiens)
atgtgtgtttttttgtttttttttttttttatgagtgagaaaaaaaagtgtttaaatttttattaatataaattaatgatatataatgatgaaattttgtttttatttttgtttgtgatagggaatgtaaaaatagtaagtggtttagttttatgaatttttgttttttgttttttttgtttttgttgggttggatttttaagaatggaggttagtgtatagttttgtgtgggttgtttagtttttggatttggtggatgatgttaggtgatgggagtggttgtggttgggttggggaggttgtggtttaggggagttgggagggagggtggttttgttaggttgatggtgtgtttggttgtgtggtgttgtttggagatggttttggtggtgttgtgttgttgtaaatagttgtttttttgttattatttatagtaggattttttggtttttgggtgtggtggttggaggtaggtttgtggtttggttttttgtgtgttttgaattatttgtttgttggttttattttgttttgtttttttttaggtgtttattgtgggttttgatttttgggtttgaagagtggagaagggaagattggggttgtgtggggatatgtgtttttgtgttttggaggtggttagtgtgttggggttgagttttggtagtgtgattttggttgttttatgtagtagggtaggagattggggggtgtggtatattttggagtattttgtttttttaaagttttgtgttttaggatgtggagttgtttttggggttttagtagttgaggtattttgtttaggtgtagttggatattgtttttttagtttttgttttttattttttaagtttgtgttggaaaattatttgttgtgggtttttgtaagtatagttttttggtgggattgaattagtttttagtgtagatttgagttttttgtaggaagtatattttgttttgttattttgaattgattattttgtttatataattatattttgtattttttatttttggggtttagtttagaattgggtagatattttttttaaatgtttttgtatgtaggttttgtatagtgtttatttgttggtgttttagggatttgatagtttttttaatatttttatatatggttgagaaaaataaataaataaatgtgttgttttttttaaaaaaataaataaataaagtatttagtattgtaaagtaggttattgtatttttttattttggattttttattttttgtttttaaatgtaggaatagtgttagtattgtttgagtttgagggttggaggttaggggatgaaggtttgtttttatgttttgtattgaattagggttagaattggggatgggggtaggggtgtatttttttgggagttgaggtttaagtttttggggttttgtatttgatgttgttttttttatttttgagttttagaattgtttttagtttttgtataagggtaaaaaggtgttttttgttttattttttttgattttgggaataagggtttgtattgaattaggtgtgaatgtttttttttattttgtgttgtttttgtttttttttttttagttgtggtttttgtttttttttgtattgtatttttggtgttggttgtagtttgtgagtagtttttgttaatttttttttttttatataggatgtttatattaggatatttgtgttagtaggtttttatggtttttttttgtagttttggggggagttatttttgaaattttttattttggggggtttatgagatttttgagataggaattgtgaaatgtttatgagattaggatatgtgttaaggtgggggtagggagttgtgagtgttggggatgtagttgggtggttgtagaagtgtttaggtttgtgtgttatttttttggtgttattgtggttgagtttgtgatgtttatatttatttataaaatgtttgttataaaagtagtggttgtggtgttttgtattttaattgtatttgtagtgagtatttgagaagttaagattgagttggtggttgtggtgtagtgaatgagtagtgattgtgtttttatttagttttgttttatagtgtttatttgtttttgttttttggttttttgtttggttttgtttaattgttatgatgatgtttttgggttttaatgtagattatgaggtgttatttttttgttgtagtagtgtgtttttggttggggatagttttttttattattatttatttgtagattttttttttagtatgggtttgtttgttaatgtgtaggtaaggttggttttttgttgttgtggggttgggggtttggggttgtggaggaggagatattgggtgggatgttttagtagatgagtagggggtttttttgtgtttggagggaggttgttgtggttggagtggtgttggtttgggggtttgggatttgttttgagtgtatgtatgtttgttatagtaagaattggttttttttttgggaggtaggtttgttttgagtaatttttggtttgtattttaggatggatttttgatattagttggagtagatgtgttttaagtataaatttgttaattagagtttggtttttttggggaggtggtagaaagtggtaatttttttttttttggtagtttggagtatggaggagggatgagggaggagggtgtagtgggtgggtgtgtaaggtagttttattgataaaaagtgagtttattttggagattttggagtggtgtttgtgttagtgtagatgttagggatatttataataaatttttttttaagtaagtgatgttgaagggataatgggaatgtagtggtaggatggaagagataggtattgtgttgtggaatgtttgggaggaaaagggggagattttttatttaggatgagggatatttaagatgaaatgtttgtggtaggattgtttttttttattgttgtatgtggtattgggaatttgttttatttgtgtttggaatttgtttgtttatgttggttttttttttttgttttgttttagg

SEQ ID NO: 298 - DNA, 3050 bp, Artificial Sequence
  chemically treated genomic DNA (Homo sapiens)
tttagaataaaatagaaggggaaagttgatgtgagtgagtaggttttggatataggtggggtgagtttttagtgttgtatgtagtagtgaagagaaatgattttgttatggatattttattttaaatgttttttattttggatgaaaggttttttttttttttttttaggtattttgtagtgtagtgtttgttttttttattttgttgttgtgtttttgttatttttttagtattatttgtttgaaagggggtttgttataaatatttttgatgtttgtgttgatgtaggtgttgttttggagtttttagaatgaatttgttttttattaatgaaattgttttatatatttgtttgttgtattttttttttttattttttttttgtgttttaggttgttgggggaggggggattgttgttttttgttatttttttggagaagttaggttttagttagtgagtttgtgtttgggatatgtttgttttagttaatgttagagatttgttttggagtgtagattagaggttgtttagaatgaatttgttttttgaagggggaattaatttttattatggtaagtgtgtgtgtgtttagagtaagttttgagtttttgagttggtattgttttggttatggtagtttttttttaggtataagggagttttttatttatttattggagtgttttgtttggtgtttttttttttgtgattttaagtttttggttttgtggtgatgggaagttagttttatttgtgtgttgataggtgagtttatgttggagaaggagtttgtgggtgagtggtagtaagagaggttatttttggttggggatgtgttgttgtagtgggaggatgatgttttgtagtttgtgttgaagtttgagaatattattgtggtggttaggtaaagttgggtgaggggttgaggggtggagataggtgggtgttgtggagtagagttgggtaggagtatggttattgtttgtttgttgtgttgtggttgttggtttagttttggttttttagatgtttgttgtagatgtggttggagtatgaggtgttgtagttattgtttttataataagtgttttatgaatgagtgtaaatgttatgggtttaattatggtggtgttagaggggtggtgtgtgggtttgggtgtttttgtggttgtttggttgtgtttttagtgtttgtagttttttgtttttgttttggtgtgtgttttaattttgtgagtattttgtagtttttgttttagaggttttgtgggttttttaagatgaggggttttggggatggttttttttagggttatagggaaaggttgtggaaatttgttgatgtagatgttttaatatggatattttgtgtaaggggggagggattgatgggaattgtttgtgggttgtagttaatattgagggtgtagtgtggggggaggtgggggttgtggttgggggaggggaggtgggaatggtgtagaatgagagagaatatttgtatttggtttaatgtggatttttgtttttgaggttgggggggatggggtagagagtgtttttttatttttgtatggaaattgaagatagttttgaggtttagagataggagaaatggtattgagtataggattttgaggatttaagttttggtttttgaaggaatgtgtttttatttttatttttaattttagttttaatttagtgtaaagtgtggaagtagatttttattttttaatttttagtttttgggtttgagtaatattagtattgtttttgtgtttggaagtagaaagtggaggatttaaaataagagaatatgataatttattttatgatattgggtattttatttatttatttttttaaagaagatagtgtatttatttatttattttttttggttatgtgtgggaatattaaggaaattgttaaatttttgagatattagtagataaatattgtgtaaaatttatgtgtgaagatatttgaagggggtgtttgtttggttttgagttgggttttaggggtagggagtgtgaggtgtggttatgtgggtagggtggttagtttgggatgataaggtggggtgtgttttttgtggggaatttaaatttgtgttgagggttggtttggttttgttaggaagttgtgtttatgggagtttgtagtgggtgattttttagtgtggatttggagggtggaggatgggggttggaaggatagtgtttagttgtgtttgggtggaatattttgattgttgggattttaggagtggttttatgttttggaatatggggttttggggaggtaaggtgttttagagtgtgttatgttttttaattttttgttttgttgtgtaggatagttggggttatgttgttggggtttagttttagtgtgttggttatttttagggtgtgaagatgtatgtttttgtatagttttggtttttttttttttattttttgggtttgggggttggggtttgtggtgggtatttggagaggggtgaggtaggatgaggttggtgggtggatagtttggggtgtgtggggagttggattgtagatttgtttttagttgttgtgtttgggagttaggagattttgttatagatagtaatagggaagtggttgtttatagtaatatagtgttgttagggttgtttttaggtaatgttgtgtggttgggtgtgttgttggtttggtgaggttatttttttttttagtttttttgggttgtggtttttttggtttggttgtggttgtttttgttgtttgatattatttgttgggtttgggggttgagtggtttgtgtgaggttgtgtgttaatttttatttttagagatttaatttggtaggagtggggagggtaggaggtggggatttgtggaattgggttatttgttatttttgtattttttgttataggtagaggtgaaaatagaattttattattgtatgttattggtttatgttggtgggaatttaggtgttttttttttttatttataaaaagggagggaaatggaaaaatatatat

SEQ ID NO: 299 - DNA, 2312 bp, Artificial Sequence
  chemically treated genomic DNA (Homo sapiens)
tgttggaggggtgttttgggagttatatgtttgttttttattagtaattgtgtaattatgtttattgggtgtgagttttttttttttttttttttaggagagtgtgttttttgttgttataggtagtaatatggtggtggaggttaaggggtagtgggtttggggttgattgtatttttgggggattgtggagggtgagtagagttttggggtattaggtttggtgggggaaggttgttttgggttggtgttagtttattatttatttttattttgtagtggagaattaggtgtattgtgattttgtgaagttgtgtaatatgtttatttgtatgtatatgtatgattttaaggatgtgatgtgtgatgtgtattatgagaattattgtgtgtattgtatttagtagatgattaggtgtgtgttttagttgtgagttagattttgtttttttggttttgtttatgtttttataattgagggttggttttgttagtttatttagatttgaattttgtattattttttaagtttttttttttttttagagtttggtttttttagaattaagtttagggttgtgagggttttggagggtagggttttagtagtggtggggatgggttaggtattgttagtttatgttgagttttttggtggtgttgttttgtttatttttttttttgttttgtgtagtaaattgatttaggatagttgtatggagagttttattttgattttgttgttgtttattttggatgttgagattgagaagtttattaggatgaaggatgaggaagtatgtggggtggtgggggtggtggaggtgggtgttagggatgtttttttgtggtgttgtttatttgttgggttgtttttgtttgtagttgaggtgtatgtaggagatgttgtagaggatgaagtagtagatgtaggattagtgatgtttgttgtggatatattgtttgtttttgggatgtttttgtatttttggatattagattggattgtttttgatttggagatgtggggttatagtttttagttgattttaatttatttttagtattatttttttttaggttattgtgtttgtttttgaggggtttggattgtagtttttgtttagttggttttttttgattttgggggattaggagtgaagttgggtgggattttagagatttgttttttttgttttttttttgtttttggatggttatagtatttaaattgtaggttttgttttggtaggtaggtaaagttaggtagaagaggatttttaggattttgggtttgttttttgttttagtgttgtagaatggatttgggagtttttttttgtttgtttttgtgggttatttagtgagtgttgagattttattttttgttgaggtgggttgagtttttttttatttttagatgtttagtgggtagggttgggttgaattaaatgggagttttttagatataaggaggttagaggttgtaaggagtggggttgtgattgtttatattttttttttatagtttggtttgatttggagggtttttggggtattgggtggtgagttattttttggtaatttttggtgttgttttttgtttttgtttgaggttttttttttttagtattgttgtggtgtgttgggattttgagtttaggttttttgatgtttttatttgtatgatttttttttgttatatgatgttttgtttttttttgttgtgaatgttgtgttttgttttggtgataggagaataatgttggtgaatgttgtagtgggtgtttgagtgttttgtgtgtttttgagagtgggtgggagtggaagtttgagtggtttgtggtttttggtgatagtgtgttatttgttgttgtagtgtgtgtttgtgtggtttttgggttatttttggttaggttgtagtattgtggttggtgtgggtgtggtaggggtggggtggttttattgtttggtttttttgtttatgttttttgttgtagagtaagttgggttgttgtttttttgttatgggttttggtgagtttggagtttggttgggtttttggttgttttttaggttgatttgggttgagaggagttttggttgtttggttgtagttgggagagatttgggttagatttagaggggatttttagttggtgtgtggggtggttagggtggagaggttggtgggttattgggatgttgggtattaggggttggatggagttgggttggtagtttgggtatttagagatgttgtttaggtgtttgttgattgtttggtttattgtggtgttttttttgtagg

SEQ ID NO: 300 - DNA, 2312 bp, Artificial Sequence
  chemically treated genomic DNA (Homo sapiens)
tttgtaagggaagtgttgtagtaagttgagtggttggtgggtatttgggtgatatttttgagtatttagattgttggtttggttttatttagtttttgatgtttggtgttttggtagtttgttagtttttttattttgattattttgtatgttggttggaagttttttttaagtttgatttaagttttttttagttgtagttaaatgattagagttttttttaatttgggttggtttagggagtagttgggggtttgattggattttagatttattggagtttatggtgagaagatggtagtttggtttattttgtagtgggaggtgtaggtgggagagttgagtgataaggttgttttgtttttgttatgtttgtattgattatagtgttgtggtttggttagaaatagtttagaggttgtgtggatgtgtgttgtagtggtagatagtatattattgttggaggttgtaggttgtttaggtttttgtttttatttgtttttaggggtatatggagtatttggatatttgttgtgatgtttattaatattgtttttttgttattaggataggatgtggtatttataatggaagaaaatggagtattgtgtggtgggaagggattatgtgggtgggaatattgggaggtttaggtttaggattttggtatattatagtggtgttggggagaagaggttttgagtgagggtaggggatggtattgagagttgttaggaggtggtttattgtttagtgttttgggggttttttaggttgggttgggttgtggagaaggggtgtaagtggttatgattttgttttttgtagtttttggtttttttatgtttggagggtttttatttgatttagtttaattttgtttgttaggtgtttggggataagggaagatttggtttgttttgatagaaaatggggttttagtatttgttgggtgatttgtgggagtaggtaaaggagggtttttaagtttgttttgtagtattggggtagggaatagatttaggattttgggaatttttttttgtttagttttgtttgtttgttagagtagggtttgtggtttgggtgttgtgattgtttgggggtgggggaagggtaagggaggtggatttttgaagttttgtttaattttgtttttgattttttaaggttagagagggttagttgggtgggggttatggtttaggttttttggaaatagatataatgatttgggagggggtggtgttgagaataaattagggttagttgggggttgtggttttgtgtttttgggttgggaatagtttggtttggtgtttaggggtgtgagggtgttttggagatggatggtgtgtttgtggtgagtgttattggttttgtatttgttgttttattttttgtagtattttttgtatgtgttttagttgtgggtggagataatttggtgggtgagtagtattgtggaggagtatttttgatgtttgtttttgttgtttttgttgttttatatatttttttattttttattttgataagttttttagttttggtgtttggggtgggtagtggtaggattgggatggggttttttatgtggttgttttgggttagtttgttgtgtggggtgggggggaggatgggtggggtggtgttattgggaggtttagtgtgggttggtgatgtttggtttatttttgttattgttgaggttttgttttttggagtttttatagttttggatttggttttagggagattaggttttgggggagggggggggtttagggaatggtgtaaagtttaagtttgggtgggttgataggattggtttttagttatggagatgtgggtggggttagaggggtgaggtttggtttgtggttggggtgtgtatttggttatttgttggatgtagtgtgtgtggtagtttttgtagtgtatgttgtatgttatgtttttgaggttgtgtatatgtgtgtggatgagtatgttgtgtagttttatgaagttgtaatgtgtttggttttttattgtggggtgggggtgggtagtgggttggtgttggtttaggatagtttttttttattagatttggtattttaagattttatttattttttatgattttttaggggtatagttggttttggatttgttgttttttggtttttattattgtgttgttgtttataatggtgaagggtgtgtttttttgggggaaggagggagaaaggtttatatttggtgagtgtaattgtatggttattgatgggaaatgggtatgtaatttttggggtatttttttagta

SEQ ID NO: 301 - DNA, 19634 bp, Artificial Sequence
  chemically treated genomic DNA (Homo sapiens)
tttgttaaaaatataaaaaaaattagttgggtatggtggtgggtgtttgtagttttagttatttgggaggttgaggtaggagaattgtttgaatttggggaggtggaggttgtagtgagttgagattgtattattgtattttagtttgggtgatatagtaagattttgtttaaaaaaaaaatttagaatgtgtttatttttttttttattattttttttttattaatttgtttattttattagttatgttttgatagttttgatagggttgtgggatatagtagaaaggttggaaaggtatggatagttgtgttgggagtgttgtttgagtaattttttgtttttagttattttttattattttattaaatataattattttattatgttttgggtggtatgaagtaatttatggtaggatgttttttaatttagtgttaaaggtaatggtgtattttgagtttttttgttttgtattttaattttggaattggtaattttttatgattgatatttttgagtttttatttttttttatttttagggaatatttgaggaggtgaggttttatttttttattttttgtggtttaatttttgtttgttttttttttgttttgttttttgttttttagagttgagatttgggtatgtgtattagttgtaatagattggaggggattttgttgtttatttttttgttatttttttttttttttttttttgattgtttttatatttttgtttttatttttattttttatttttgttttgtatttgtttttagtttgggtttggggatttgttaggttggttttgatagttggggaattaatttgttttgtttatttttagttttgagttgtgtaggttttgtgtttttgtttttgtttttttttagtttttttgagtggaagttgttataaatggtttgaatgaaatgtgtgtgggtttagtgagtggtgaattattaggggattttgtttttttataaattagtatttttttgaggaggaggtgaaggagtgggaggaggtaatgagttgagagttgagttttgtgggtgtgtgtagtggttggagtgtgggggtgaggttgggttattttttttttttggttgtgtattgtttggtttgtggtggttttaggtattattttttttgtttgggttgagtttgttgtggtagtgattagtttttgtggttagtggtattgtttattgatgagtggtgttttttttttttttttttttttatgatttttttttttgtggtggtatgttgtttagtagtttgttttgttttgttgttaattttgagttggaggagaagtaattttggtagtggttgtggggttggaattttgtttttttttggtagtagtaggtttgtaagttgttggggttaggtggggtaagagttttgttggtgtattagtgttgttttggattgtttgtaatgtgtttttagtgagttgggagtggggttgtgattgtgagttgtttgggggagggggatttgtttttttttttttttagagattttggtttgtaattggattaaatgttgttgaaaggatgtaaataggtagagtaattgttattaagaaggttattatttttatttaaaggtagtgaggagtgtggggttttgtttgggtttttttgagttttaatagtaattaatagttaggtgttgattgtaattttttaaggttagttattgggagtagtttattttttttaggaattttggagggtatattttgttgggatttaatttggttgagaaatgtataagatgttaaaggaggaaggattatagggggtgtgtgtgtgatttttaagattgattttttgttattattttaatttttggttttttgttatttgggtgggggtgagtatgtgatatgtgtttaatttttagtagtaattttggtagtaggtgttgattttaattaagtaggagttgtggttgttgggtgtgtttttattaagttatgtgagttttgggtgtgttttttgtttgtatgttgtggttattgtttttgttattgtttaaggtgtttgttttttttgtttttggggttgtttttgtgtttagaaatgaaatttgtttgggggagagttgtgtatttatagtgatttagtgttgtggtagggatgtttggggattgggaaattttgtaagagatgttttgtgagtttgagtatttagggaggagtagggggtagtgttttttgtgggatttttttgggatttgttggtggttttgggttgtgatttggttgtaggtagaggggtggaggtgttggtagttggatttttgggatttttaattaggttatttggtttttggaggtggaaaggtgtttggggttaggagttttttgaaattttggggagagggaattttatggttttttagttttttttttagattttagaggaggaagagaagggttttagaggtgttggtatttttgggtgtagttaggagtagagtgtgaagatagtttttggagttagtgattttttttattggttaaggagagttgggaaattttagggtttttattataagtttttgtttaagatggttaatggattggtggggtatgaagggtggataattgtatttttgggttgggtgttggtttagaatggatttttgggtgaaggaatttatgagtttgggggtttttgttggggaaatagtatgaattggtgtgtgagattgaagaattttttttatttgttgatttaggagttttatggagtttatgtggttatgtgtttgtttgtggtgatttttgggattggtattattggtaatttggtggtgatgtgtattgtgtgttataattattatatgtggagtatttttaatttttttttggttaatttggttttttgggatttttttattatttttttttgttttttgttggttattttttatgagttgattaagaagtggttgttggaggattttttttgtaagattgtgttttatatagaggtaatgttttttaggggtttttaagttagtggttttatttgtttttgggattatagtattagagaattgttgttggatgtatttatttagttgaatgttttttttttttatttggggtttttttttatttttttttttaattatttatgtatgtatgtatatataaaaagaggtagttttgtgaaattatttttaaatttatttgtttttgggttgtaaaaaaaggatgattttataatatatagaattgtttggagtataaatttatttttttgaatatggtgttatgtgtatttttgatttggtatttgttagagattttagggttaagtaaatggttagtttaaggttgttattattagagtttataaggaaaaaaaaaaaaatattagtatttgtgtattagttattaagtgttttaatgtgagtttttttttaagaagattattgtatttttttttaaatagtaaagttggagtaatattttattgaaagaaagaaagaaagaaaattgtgtttgttagttggttttatgatatattaataattttttaaattagtttaagtgtttgattgttttttatgttattttatttaaatttttaagttattttttgtttttgtttttttttattttggttttttaattttatttttgtgtgtttgtgtgaatttaagtaaaaataagattttggttagtgtggtatataatttgtttaatatttttaaagttatatatttgttatttgttatgggtggaaagattggttattttaagggattgattttaagattagaaaattttttgggaagaagggggtatatttagtttttaaattttggaaataaaaattattttgagtgaaattgtattgttttattttatagttagtgttttggtttattattgtggtaggtggattttgttttttaaatggtttttttttaaatattagtttttggaaggggtttaattgttttgttgttagttgtgtttttagttagttggtttttgattttttttatttagattgtttattttatttatggaagtagaagaagggaaattgtaaatattttgtagtttttgattttgtttggtattagggtttgtgatattatgtttaatattgttttaggtttaaagttgggggataagtaaatagaaaatagtatttatttagatggattaaagttggagatagtaaataagattttttgttattttgatagggattaggtgtaggattattttatgattatgaaattagttgttgttgttttagtagtgtttatgattttttttgttgttaagtttggtgtatttttgaaatatttattttgtttggtagataatttatttttgaattgtgaaggagttagttgaatttatgttagagaatatgtgtttatttattaaattgtttttttaaggttagttttaaatttttttttttttttttttttttttattagaagaaattgatttatgtaagaaagagataaaagtataaagtggataagagaggtattttaatgatagagaagtgtattggtttattttattggaaatgtattggatatgtagaaatttgtatatattagagggaaaaataataggatagaaaaaggaaattggggaaagaaaaataaaaatattaaagtttttgaaagaatattttaaaagaaaagaatattaaatttaggaaagattataaaaattttggttaatttaatgagatataagtattttgagtaatggtatttattatgtatttattttaattttttttttttgtaattttgagtttgtataaatgtaatatttttttttatttgtattttattttttaatttaattagtttttttttaagagtgttttgttttttgttttttattattagtaaaattttttattttttgtatttttgtttaatttttttttattttagtagttttttttattttttagttattagtgttagtatttattttttttagagaattaaaggtttaaaaaatttatttatttattttttaaaattatagtataatatatatttttattgttaaaatagtgaatgaatattttaatatgtagtatttttatatttttatttaatttttattattttgaaataattttagaatggtttataaaaataattattggataatattgttggttttataatttttgattattgagaataagaattatagtttaaattttaaaataaaagtgtgtttttaggaggtattgatgtttttataaaagtaagaggtatttagggttttttttatgttgggtttttgtaaaaataggttttgagatgtagatttattggggtattaagtttattgggttgtgtttttaggtttaatttattaaggaaagaagaaagtaggattgggtgggtaaagggagaagttgaattgtgatgtaattgttatagagattttagttgatattattaggagttttagggttgggatggttatgtagttatattttaaattgaggtaagagggtttagtttttatatttttttatggattagttattagatgtaagatattggatgtaagtttgtttttaggatggggtataattttgagttgggtggatttttttggttaagggtaatttttagagagggatgtagttaagtattgttaattaatagttttagtagttggaggaattagtgttttatttttgaaggattttggagggagttgtttgggtggaaaattatagtatttattatagtagttttttttttttttttttttttgagatggagttttgttttgttattaggttggagtgtagtggtatgattttagtttattgtaatttttgttttaggggtttaagttattttgttttagttttttaagtaattgggattatgggtgtgtgttattatatttggttaattttttttgtatttttagtagagatgggtttttattatgttggttaggatggttttgattttttgattttgtgatttgtttatttttgtgttttaaagttttgggattataggtgtgagttattatgtttagtttatagtagtttttgaataattatgttaaattagatatagataatgttttaatttaatttttttattttaaagatgaaatttgaagtttagagattattttaaatatatatatttggttagtagttattagatttttggttttaatgttttatgtttatatttgttgattagattaatttgtatgaagtataagttttatttagtgagtgttttttttttttttttgttttttggtatttgaaaaattttttttttttttaatttattagataggaaaaaataaaaatttgtaaatattatttgttatataatgaaatgtatagttttttttgttttttataaattgttagtaagttttgtaattggtagttaattaaaattttttaaattgtagtaatttgagataattatattttttaatttgtttagtatgatgattttaatgattaaaaagttatataggttaaattttatgtttttaaaattatgaagtatgttagattggtgaaggatattataagtatattatatttgtttaaattttttttaaatttttttttaaaattttgtttttgattttaagatttttaaaaattttttgatattttgtttatttttatatttttaaattttgttatttttttatttgttatttttttattttattttttggttattttttttttttttaattatgtataatatttttttatagatttatgatgtagtatttattattttttagtaagatgtttaattttttttagtgtttttatttttaatttttttgtagttaattttaaattttatttttaatagattatgattgaattttataattttttttttttagttttttttttgttttattttttttttttattatagtttttttttttgtatagtttgagtgttagtataatttgaagggaattgtgggattttggggaagatttgggtttgtgtagaaaaatatgaggtattttttgagtaaaaattatattttttttaatttttatttaatttttttttttattttaatttgttggtttaaagtttgaggatagtatttagtttttaaggtttattgtgagaaaggaagttttatgatgtttaatattgttgtgagtgagaatgttttgggaattgttgtagttgatgatttttttttttttattttaggattatgatatttttatggtttaataataaattttataaagttgaaggataaatgaaatggtaggaaatgttagataggagagaagaaaatttggatagattatggttgtttttttagatatattagtttaaagtggtttattatttagttataagaaaaaaattatatttaaaataaaatttgtatatgtagtgtgtttttatgtgtattaggggaggtggagatatgtgtgggtgtggattgtaataggagaatggtagaggagttttttattatatttattatttatttaggaatttaataagtgtttaaaattaaataatttgggttaggtgtggtggtatatttttgtaattttagtattttgggaggtttatgtaggtagattgtttaagtttaggagtttaagattagtttggttaatagggtgaaattttatttttataaaaaatataaaaattaatgggatgtggtggtgtatgtttgtagttttaattatttaggaggttggggtaggaggatttttggagttttggaggttgaagttgtagtgatttatgattatgttattgtattttagtttaggtgatagagtgggattttgttttaaaaaaaaaaaaaaaaaatttaaataatttagatattaaatatggtaattggaatgaatttttgtttattatttaatggaagttagaattaaggtattatttgattgagattttagataatagattaaggtttgtttggatattaattggaggttttgaatgattgagattttttttagtttaaagaatttatatttttatggagtgttgtagaatagaaggttttaaataattataatgagataattttagatttaattgtatttttattttattgggataaaatttttgtatagaggtggagagagaataaagggaatatgttttattatggtttttggtttgggaataatttgtgataagtttagaattttttttaatgagaggaattagtttttttaatgattttagtaatattggttttaagttgagtggaataaatggtttttttattgttttagattgtagttagtattgataagaaagaaagggtttttggaggttgaagatgatagtgttatataattatttgagtttatatagatttttttagaatgtttgtatttaagtaatagaatatttattatggtatatggtaaattttttttgagaggtggattagttattaggtattttgttggatttttaagtggaaatttattgttttatgagtaattttaaagttattaatagtatttttagggaaaatgtgtttaatatatgagaatggtgttgaataaatattttatgattttttattaattttttagtaattattttatatatttttatgtaaatgaaaatatttagttgatgattttaataggaagaaaagtgttttttagagtgtatttttatttataattttatttttgaatggtgtatggtgaagttaattgaatttggattttttataagaaagaaaagttttataatatttaaataagaaatttaaatagtttttttttttattgattataatgagaatgtgtttttttttaaagtttgttaatgaagtataaataggaaaattgattttttaattttttttttatagatattgtttggtatttagtttttaaggattatatataaaatagtagtatttaataattgattaaagaataatttgaataatttattattttttgtaatttttttttataggtgttattatttgtttatttgtttattatttattgatttattaaatgtttatttggttttttttttatgtgaggtattattaggagtgggtaggagaaggtaatataggaagagggggaaaagtttttaaagatgaatattatagatgagttattgttattaaaattatagaaaagtaaagtaatgttttatattatgatgaatattataatagaggtttgaataaagtattgtggaagtttagaaatggtattgaaatgggttaagttatagttgtgtttgttatgattagagatggagaaattaaagggaaaattgtgttttttttaattttttttagttatatttttattattaatttttataaattttataaatgtttatatagtttagatttatgatgaaaagttataaatgtgaaaattttttaatttttgtttttttgttttttttagtttttttaggatagaaagtttataataataattggtaaaataatttagtaaatagtttagttttagaaattttttttaaaatatggaatttgtgttagtgtttaggatatttatttttgttttataattagtttttattagttataaggatattaaatatgttaaaattaaatattttatttaaatgaatggtttatttggtaatgtaataatagtatattaaattgagttttttttttttgaaaaaattaaaatatatataaattgtttaatttgattttggagaatttaagaaagaagatggataagggtgatattttagattttattgtggagttgaggaaaggggagtatgatgaatggatttttttaagaattggattaattttttaagtatataattagagtgaagatttattttgagtttttgagggtttttaaggtattttgttatgttagtaaagtatttttttatagagataaggaggtaaatgtgtttgtagaagtaaaatagatatgagtttataagtttattgaaggttgagtgggtgagggtttatttttgtttttatatttaggttgtatggattttgatataatttttatatttttaatggtatttgttttatgtgtggtaattttttaatagtattttattggaagtatatggatttgtgtttgggatgtagattgtgggagagggatgggaaggtagttatgtagtgtagtttgtttttgtttttgtatttttgttttattttttagggatgtgtttgttattttattttttatgaattgatttgttaaggtttaataatgaatttaattttgttgttaagattaatttttaaatattttaattggaataatattttttgtgttagaagagatgattttatttaaaattttagagtggagttgagaatgggattattgtaatgttaaatatggagggtttttttttatttgtagagtaagtgtaggtattttttataaatttttataaaatgtaggatatgattattgtgttagttttgtttttgagatagaatattttttatttgtgaatttgtaatagtttttagtgttatttgtttgtatatttgaatagtttatagtatttattaatgaggttaaggttattgatttgatttttgtttagaatgagatatttttattaggtttgtgattttatttagggatgttatttttttttttttttttgttaaaatagttttttttttattaatttttatttttagggtttatttttattattgtttttttaatttaaattttttttatattggaaaagtatttgataagttaatttgtattaagatatgtaatttagaaataattgttttttataagaagattgaattaagaaagaaatttttttaatagattattaatagtgaaattttggttaaaagtagataaattttgttttaaaatatggttttttaattttattaaaattatgatgatttaattatatataattttgtttttagtttgagtttatagttatgtaaattaatattattagttagaaagggaaataggtaaaaatgtgttattgttttttggaaatttattagaattttaaggtaaggaattgaaattttaggttattttaagattgattaggaatattataataatattaaagattgagaattggattgtgggtttgggggaaatattatattttgaaatgattttgtaattattgagaataaatatggaatttttagaatttaatatagatggtttatattttaagataaaatgttgttaattttgttttatttatatttttattttaataaatatttgatagattgataggaattataatatgttaggttgtagttaaatgaatttttttaattatataaggaatgtattgtgttatagatattataattggtaataaattttaatttaagataggattataaaggaaaagaggatttatggaattaagataagttttgggagaatatgttgatttttaaatagttttaaatggtttttaaaataaggaaagtgtggtattaagtttaggtaaaagaagagaaggtggagaatgaggtagtaaggatagttgatagttgatgtttttaaaatattttttttttatggtattgggaattatatgtaaatggaatagtttgagtatattagaaataaatggttatttattatatgtgggtatattagattaaatattagttgataaggataagaagttttttttttgattgtggaatagtggttgttagagttttgttttattttagagagtgtataagtagtgtgtgtatgaatgtaaggggtgaggaaagtttttttttttttgtttttggtttagaaatgttaattgaagtgtgttattgttatagtattatgatttgtatatattttaaaattaagattttttgtaaaaggttattttatttagagtagtttgataaatagtggttttgataaatttgtttttttatttgtgtttaaaaaagtattttttattgttgttttgaaatgttgtaaggataaggataatggaaaaatgtaagaagaagttaaaggtatagaagttttagttatttagaggttttattttgtgtttattttgttttttttttgattggttgttaggtttgtaattattgatataataggttattatttatagtttaaatgaatgggtttttttaataataatgtttttgttttgagggttatttgtaaataaaggatagtatataaatagatgtatttaaagattttttatgtaaaatataagttagtttagaatgtagttaataagaatttggttagaaatttttttattttataaaaattagtgtattttagttattttattgtatttgagtatgtagatttaattttataggaaggaaattttgtttaggatattgttttgttttttttttttttattggtgttattattgatttgtattggaaagttttgtgaaagatataatttattttatgatttgtattttatgggttttgtgttgtttattttatgttttatttttatttttaattttttttaatttgtttgtagttagtttttgagaaatgtagtagtagttaagataggatttttgtagattattggtttttataaagtatttatgggttttttttttatattattttgaatgaatagagatttaatgtagtataaagtggttatggtagtttaggttttttaggttttgatagttgttttaaattagaaatttgagtagtgggaaaaatgaaatttagttatattttgatttataaagtatgttttttattttttattaagtattttgttttataagtttttttttgtttgtattattttttttaagagaaatttagggaaatatgggatttgaaattattggaaagagtgatatattttttttttattttattaagagatagttttattttgaatttttttttaaagttattgttgttatgtaatttattgattgggttaattttttattggggtataaagtagttgttttaagttggatagtataggtgttgaattaaaatttgggatttatgattttataaatatatgtttaatagagggataaaatatttgaaagttgaggtatatttatggtttttataattattaagttgggtttttttaaatttagttttgttagtggtgataagggattagatgaggatttgtattatttttatgtaggtgattgtatttgtatttttttattattttaattaaattatttgttttttgttggtttttttttgtaataaaatttaaaaggtaatttaagaagttatttataaaaatttttattatatttttaaaattttttatattttataggttttttttttttattttgtggtagatttttatagtgtattatattagtatttataattaggggagaaatatatattattttgttttttattaagaaaattgaggtaaggagaaaatgagaattaatttgttagagtattgaatgttgtttgaatattgaatatttggaatgttatttgaaatatttggattattaaattgagttaattgtattttaattgtaattaggaataaatttttttagatgattttaaaatggagttttgttagttagaaaaatatttaaaatatagaatataataaaattattttatgagtgttttaagtttttagtatttattttttagtattttataaatttttaaatgagtaaatattgtaatagtataaattttatttttaaaattattattataagagaaaatttatttattatttttatattattatttaagagaaaatttaagaaatttatttaaattttaaatgatttatttaatgattttttaaatgattaaagtaatatataaagttaatggtaattttttttgggttattttttttttttatataggagtaaatttttataattttataagggttattatgtatgttaagagtaataaagagtatatttagatatgaattttgggtggtttttaagtttttttttttttttgtattatttttgtattttatggatttaaatagatattttagttaaaatataaattatgattgtattgtattgttaataaatagttaaattgataattataaggttattttagtttaatagattaagtaggatatagatgatatttgtaaagaattggattatattttttgaaatgtagttatatattaggagaggttttataatttggttagtttgtaaagttagttagatatttgtagtaatttttttaggagatattgtgaaattatgtttgttttttaattttgttaaattagtgatttttaattgtagtttttaggtaaatatggatatgttttagattaaggggagttatagtgagtatgttagaaattgttagttaattttttttgtttagtagattgtaatgagtgattttatatgtaaagtaatttgttggttgtatggtagtaggtgggagatagttgagaagttttgttatagattttagattttttgaggataaaatttttgttttatttattattgtttttagtagtagttatagtatattttatagatttttttttttttttttttaaaaataagatatatatatatatagtattgtgttaatgtagtggtttttttgttagtaatatagtgtttaataaaggtataataatgggaatagtttaggggtgattaagaagaatgattttaaattttttattttggtgtttaaagttttattgttttatatgtgggttgggtgggagttgaaggagttttattgttgttattttgggatataaagaaaagtagaatattgttgtttgaaagattttagagttgtttattttgatttttttttatttttgtattttaatgttaatttttttaaaatgtttaatattttattttttttaatagttaaaattttgtttttatttttttgttgattttgaaattattaaaattaatagttttgtttttgaaaagtgtttatagttttgtttttgttgttgttaattattttttttattgtagtttaattaataagagattgtattttatttatttagttttttaggatgttgttttaaagaattatttatttaagttaatgtttaatagttttatttttgagagtatattttatggtgatattgaattttagtaattagatatggttattaaatgtagaagatttggtgtttatgatgtagttttataattgtatataattgtattatttattttagaatttttaataagttgtatgtaaataagtatattttaaaattgtgatagaaatttttttatgttgttttaatatttaggaattttaattatatggatagattttatgtttgggtaagaagaaattagaatgttatttattatttatatgatttttattaattaatttttgaggtgtgtagttattattttatatatatttaaagttttttataaataatttggaaaagtattgatagggtttttgtatattttttgtttttttatattataaaatgtagtgtgtaagtgaatttatagaaaaaagatttgaagtaatattattgtaggtagtggtagtaggagagagtagatgtttaggattggtatttgggatgtagttgttaagagtaattgtattttaagtgttagttgtatttggagtagtgttattttttttggtttttttagtaattttttttgttgtttttgtgatttttttggattgtttattttgttgtagttggattttaattgtagagagtattattagagaaaagtttaatttgaaaatagaagtttggatgtaggagttttttgaaatttgtatatgaaaattggggaggattttttaatttatgatttattaaaaagattatagattatgtatgtttgagtttttgatttggtattaaagtttttgggaatatgattgaagaattgagtatttttagataaaatatagtgtagaatttttgatgataagttggaatatatgtaaattttgtttaatatttgttttggtttttgttgttttatgagattgaaggtaaagaatttggaaaaatattgttttgtttttttaggtagttaatattttttaattaagagtggatgtgtagtatagtttttgatatttaaggagttggtaatttaatatatttattttaatatatgtttattggtatgtatttgttattattttttattaaagattttgtaatttttggagttaggtatgtagttattagtatatgtgataattgatttatatttttttaatttgtggatttaaaattagggagattaatagagaagatgttattttttgtgtattgtgtgttttttgtaagtaatgatagaaaattattaagtaaatagatgttttgagtttttaaaagattgtttttttttagagtttttagtatttttatattattgagttttttttttaatagaaattttatttgtgattttaaaaggatgtatagtataaattttggaagttttgtatttgtggatttatttgggttataaagtgatggggaagtatgtataaagatttgttttagtgaagatggtatgaaagttttgatgagggtttttgatagtttaagaagttttgttttgtttttgatagatttaggagaaatgaattaaaatatttgaaaaattaatatataaatgttaagttttaaaaatttataaattaaggtattgtaatttttatatgatattgtttgatatagaattttaggaagtggttagttgtttttagatgtttttattaagtggtaattattggtattttaaaatatgattataagatagttgtataatgtggattttatttttagaattattttgtgtttttagtatagatgtaaaataaatttttattaatgtgaataatttttaatttgaaggttaattattaaaagatgaaagtggagattattttttgttatttgtagttatattaggttgatgttttatatgttaatgtttatgggagatattttgaaaaatttggagaataagaattgtggttattagtttaattgtgtttttttatttgtattgattagagttttgttagttatatttttttttttatttttgtttttaatatagttaatattttattatattttatttttagattgtttttattattagttatgagagtagttagggtataaatataatgtttttattttttatattagaattagtagatgttgtttgatatgtagtgtataaggaggaaatatttgatattggaattgttagaatttttaaggtaagttgttgtagttttggggagagtgatagtttgaatgtagtagataaataattaatgttttgagtattaaaattgtatgataaatggttttttttttgttaatattatttttttgatttttaaaaaatgagatattaatattatatttatattttttttgtttttttattagggaatagtttataattatgttttttaaatttttttattagtaggtaggggagagtaaaagtttatatttaagttgtttgggatgtagattaaagtattttatttatttagggagtttttttttagttttatattttatttgaaatgttattaatattttattttttatttattgtttttgtttaaatatataaataatgattatatttattatatattaaattatttaaaatttttttagaatatttaagtaggtttaatattgttaggtgattgttgtgtttatgttgtaattttgagaattattgtttttattttggttgattatgatatgtttgagggaagggattgttttttgtaattttttatttttttgatattaagtatagtgtttggtatagagttgatataaataaatgtgtgtttgtgttggatatgtatttgtttgttttatttgagtatatgtataatgtttaataaatattttataagtaaatgaaatgatagtatgtttatattaggaatatgtgtttatatttttggagagtttttatgtgaaaaaaaaataggtatatatttttggtttttaatttttaaatgttgatttttttagatgtttggattatatgtttataagagtagtgtttttttgaatatagttttttatgtggttattgttaaagagttttatgttttaaaatttttttgtgtttgggatatttagatattttttttggttattttttgtatatttttttgtatttttatatgttttattttagtattttttatttttttaaatttgatgtatatatttattttatgataaatatattttttatgtttgattttgtatttttggtatataaatttatagtggtttattgttttttgtatattgtgatttttgattttgtgaatttatgttttttgaattttaattataggattttttgaggtttggttttaaagtgtatttttttagagaggatttatgtttgattttaattaggtgtttgggattattttaaattgtattttgggttttttgagttatgtagattttggaaattttgattttaatattatgtaagtttaggtttttagttagaatttgttattttttttttttttttttttttagtttatttagatttaaattttgttatttaggtagatttttttattattttttttttttttttttttttatatttttaaagatgttagtatttgaggagttttaaatttatagggagtttttgatttaatttttatttatattggttttagttttgttttttgtttttgtgtatttgggtattttgttttatttttttagttaaaattaatttgaaatttttattaggattggtaggtgtttttagggtaaatatgtagtatgaagagggaggggtttttggtttgtttgaaatttgttttttttttgattttggtttttggagaattttttttttttgttttttgtaagtgtatgtttttgaaaataatattgtaatattttattttgtatttaggaaaaattggaggagttttttaattatttagtttattggagataataagtttttgagtgtttgttgtgtgtaaggtatattattgatttttatattggaaaatatgagtattttggttagtaatgaaaatgggaatttttgtattattttgattttttatttagattttttagtggtagatatttttgtggtgaataaaatttttagtgtatttgggttttgatttataataaaaagggattggattagttgatttttatggatttttttagttttaaatgttttgtattttatgatttttaaattattatagtgtgttttttttttttatgtttataatgatttagttgatgttttgagtttagttatttatgttttattttggaaaattgtttttttttttttttttatttttatttatttatatttttttttatagttttgttaatttgtatttattttttagtgttttgattttttgggggatattgggaataaatgttttttatgtttttttatagg

SEQ ID NO: 302 - DNA, 19634 bp, Artificial Sequence
  chemically treated genomic DNA (Homo sapiens)
tttgtgggggaatatagaagatatttatttttggtgttttttgaaagattaaagtattaggaaataaatgtagattggtaaaattgtaaaaaaaaatatggataaataaaaatgagagagagagagagaatagttttttagaatgaggtatgggtaattgggtttaggatgttagttgaattattgtaagtataaaaaaagaaaatatattgtagtggtttgagggttatggagtgtagaatatttaggattggaaggatttataaagattagttagtttaatttttttttattatagattagaatttagatatattaaaaattttatttattatgaaaatgtttgttattaggagatttagataaggagttagggtagtgtagaaatttttatttttattgttgattaggatgtttatgttttttagtgtgagggttagtagtgtgttttatatatagtaaatatttaagagtttattgtttttaatggattaaatgattggagggtttttttaattttttttaaatgtaaaataaagtattatagtattatttttaaaggtatatatttatggaaaataagaaagggaaattttttagaggttaaaattaaaaaggaaataaattttaaataggttagagatttttttttttttatgttgtgtgtttgttttaggggtatttgttaattttggtgagggttttaagttagttttagttagaaaaatggggtaaggtgtttaggtgtatagagataggaaatagagttggggttaatgtgggtggggattgggttaaagattttttgtgaatttggaattttttaaatgttgatatttttagaggtgtaaagggaaaaaagagagagagataatgaagaaatttgtttggatgatagggtttgggtttggatgaattgggggaaaaggagggaaaaaaatggtaaattttaattgggagtttgaatttatatggtgttaggattagaatttttaggatttatgtggtttagaaaatttaaaatataatttaaaataattttaggtatttggttaaaattaaatataaattttttttggaagaatgtattttaaaattaggttttaaaaaattttatagttaaaatttaagggatatgggtttataaaattaaaagttataatatgtaagagataatgagttattatgaatttatatgttaaagatatagaattagatataagaagtatatttattataaaataggtatgtatattaaatttaaagaaataggagatattaaaatagaatatgtaaaaatataagaaaatatgtagaaaatagttaaaaagaatgtttagatattttaaatataggaaaattttggagtataaaattttttgataataattatatgaaaaattgtatttaaaaaggtattgtttttataagtatatggtttagatatttaaaaaaattaatatttaaaggttaagaattaaaaatatgtatttattttttttttatatagaggttttttaggaatataaatatatgtttttaatgtaagtatgttattattttatttatttataaaatatttattaagtattgtatatgtatttaaatggggtaaatagatatatatttaatataagtatatatttatttatattaattttatgttgagtattatgtttggtattgagaaaatagaaagttataagaagtagtttttttttttaagtatattatagttaattaagatggggatgatggtttttaaagttataatataaatatagtaattatttggtaatattaaatttatttaaatattttggggaaattttaagtaatttaatatgtaataaatgtagttattatttatatatttaaataagaataatgagtagaaggtaaaatgttaataatgttttagataaaatatgagattaaaagaaaattttttgggtggatggaatgttttggtttatattttagataatttgaatataagtttttgtttttttttgtttgttggtaggaaggtttaagaagtatggttataggttattttttggtaaaggggtaggggaaatgtaagtataatgttaatattttattttttaaaagttaaagggatgatgttgataaaagggaaattatttgttatataattttagtatttaaaatattagttgtttatttattatatttaagttgttattttttttagagttatggtaatttgttttggggattttgatagttttaatgttaaatattttttttttatatattatatattagatggtatttattagttttaatatggaaaataaggatattgtatttatgttttgattatttttataattagtagtggagatagtttgaaaatgaggtataatgaggtgttaattatattaaaagtaaaaatgaaaaaaaaaatatggttagtaaagttttagttagtgtagataaagaggtataattgggttgataattataatttttattttttaaattttttagaatgttttttataaatattggtatatgaaatattaatttaatatgattgtaaatgataaaaaataatttttatttttattttttaataattaatttttaaattaaaaattgtttatattgatgaaaatttgttttgtgtttatgttagaggtataaaataattttaaaaatgaggtttatattgtataattgttttatgattatgttttaaaatgttagtaattgttatttaataaagatatttaagaatggttggttattttttaaaattttatattaaatagtattatgtagaaattatagtattttagtttatagatttttgaaatttgatatttgtatattagttttttaaatgttttgatttattttttttaagtttgttaaaaataaaataaaattttttaaattattagaaatttttgttaaggtttttgtgttatttttattaaggtaaatttttgtgtatgtttttttgttattttatagtttgaatgagtttataaatataaggtttttaaagtttatgttatatatttttttgaaattataaataggatttttattaaaaggaaagtttagtaatataaaaatattggagattttgaggagaggtaattttttagaggtttagaatatttatttgtttggtggttttttattattatttgtaaagaatatataatgtataaaagatagtattttttttattaatttttttagttttaaatttatagattgaaaaaatatggattaattattatatatgttagtaattgtatatttaattttaggagttataaagtttttaatgaaaggtaatggtaaatgtatgttggtggatatgtattaagatgggtgtgttagattattaattttttagatattagaagttgtgttgtatatttgtttttaattagaagatgttaattgtttaagaaagtaaaataatgtttttttaggttttttatttttaattttataagataataaaagttaggataaatgttaagtaagatttatatgtattttaatttattattaggaattttatattgtgttttatttgaggatgtttagttttttagttatatttttaaaagttttagtattaagttaaaagtttaaatatatatgatttgtagtttttttgataaattatgaattaaggaattttttttagtttttatatataaattttaaaaagtttttatatttaggtttttgtttttaaattgaatttttttttgatagtattttttgtagttaggatttagttgtaatagggtaaatagtttagaagggttataagagtaatagagaaagttgttgaaggagttaaagaaagtagtattgttttaaatgtagttagtgtttgggatgtagttgtttttggtaattgtattttaaatgttagttttagatatttatttttttttgttgttattgtttgtagtgatattattttagattttttttttgtaaatttatttatgtattatattttatggtgtgaaagagtaagaaatgtataaaggttttgttagtatttttttaaattatttataggaggttttaaatatgtgtaaagtagtaattgtatattttagaaattaattgataaaaattatatgaataatgagtggtgttttaatttttttttatttaaatatgaaatttatttatgtaattaaaatttttagatattggagtaatatgaaaagatttttattataattttgaaatatatttgtttatatgtagtttattaaaaattttaagatgaatagtgtaattatgtgtaattataaaattgtattatgaatgttagattttttgtatttaatgattatatttgattgttaaaatttaatattattatgaaatatgtttttaggagtaaagttgttaagtattggtttagatgggtagttttttgaagtaatattttgagagattgaatgagtaagatgtaattttttattaattaaattgtaatgggaggaataattaatagtaataaaagtagaattgtaaatattttttagagataagattattaattttgataattttaagattagtgggaaaatagaaataaaattttaattattggggaaaataagatattgagtattttgagaggattggtattagaatatagagatggaaaggaattaaaataaataattttaagattttttaaataataatgttttgtttttttttgtgttttagagtaataataataaagtttttttagtttttatttagtttatatgtggagtagtgaggttttggatattaaagtgaggggtttagggttattttttttgattatttttaaattgtttttattattatgtttttattgaatattgtattattagtaaagagattattgtattagtataatgttatatgtgtgtgtgttttgtttttaagagagaaagagagagaatttataaaatatattgtagttgttgttgggaataatgatgaataaagtaggaattttatttttaagaggtttggaatttatgatagaattttttgattattttttatttgttattatgtagttagtaagttgttttatatatggaattatttattatagtttattaggtagagaggattgattaatagtttttggtatgtttattgtgattttttttgatttgggatatatttatgtttgtttggagattgtagttgagaattattagtttaataagattggaagataaatataattttatagtattttttagggaaattgttatagatgtttaattaattttataggttgattaaattataaaattttttttgatgtatagttgtattttaagagatatgatttaattttttgtaaatattatttatgttttatttagtttattagattaggataattttgtgattgttagtttgattgtttattaataatgtagtatagttatgatttgtattttaattgaagtatttatttaaatttgtgggatataaggatggtataaaaaggaaagagaatttgaagattatttagaatttatgtttaaatgtattttttgttgtttttgatatatatagtaatttttgtaaagttgtaaaagtttgtttttgtgtaggaaaaaaaaatagtttaggaaggattgttattagttttatatgttattttagttatttagaaaattattaaataaattatttaaagtttggatgggttttttaagtttttttttaaatgataatatagagataatagataaatttttttttataatgataattttaggggtaaaatttatgttattataatatttgtttatttggagatttataagatattggagaatgaatattaagggtttaaaatatttataaaataattttattatattttatattttgaatgtttttttaattaataaaattttattttgaagttatttaaaaaggtttatttttaattatagttaagatgtaattggtttaatttaatgatttagatattttaagtgatattttagatgtttaatatttaagtgatatttagtattttgatagattagtttttattttttttttgttttagtttttttaataaggagtaaggtaatatgtattttttttttaattgtggatgttgatatgatatattatgaaagtttattataaagtggaaaaaaaaaatttataaagtatggaggattttgaaaatataatggaagtttttgtgagtggttttttgagttattttttaaattttgttatagaaagaaattaataaaaaataggtagtttggttaggataatgaaggagtataaatatagttatttgtatggaaatgatatgggtttttatttagttttttattattattggtaagattgaatttagagaaatttaatttggtagttatgagaattataaatatattttagtttttaaatattttgtttttttgttaaatatgtatttatgagattgtgagttttaaattttggtttagtatttatgttgtttaatttaagatagttattttatattttgatgagaaattaatttggttagtaagttatatgataataatgattttggggaaagatttagagtgaaattattttttgataaagtaagaaaaaaatgtattgttttttttagtaattttaagttttatgtttttttaggttttttttaaaaaaaataatataaatagaaagaaatttataaggtaaaatatttaataaaaggtaaaaagtatgttttataagttaagatataattagattttattttttttattgtttaagtttttaatttaaagtaattattaggatttgaggaatttgggttattatagttattttgtgttatattaaatttttgtttatttaaaatgatatgaagaaagagtttatgggtgttttatgaaaattagtaatttatagagattttgttttagttattgttgtattttttagaagttaattgtagataagttaaaaaagattaaaaatgagagtaagatgtgaagtagataatatagagtttataaaatataaattataaagtaaattgtgttttttgtaaaattttttggtataaattagtgataatattgatgggaaaagaaaaaatgaaatagtgttttaagtaaaattttttttttatgaaattgaatttatatgtttaagtatagtgaagtgattagaatatattggtttttataaaataggaaaatttttaattaagtttttgttaattgtattttaggttggtttatattttatataaaaaatttttaagtatatttatttatgtgttgttttttgtttataagtaatttttaaaataagggtattattgttaagaaaatttatttatttgggttgtgaatgataatttattatgttagtggttataggtttaataattagttaggaaaagaataggatgagtatagggtagaatttttaaatggttggagtttttatgtttttggtttttttttgtatttttttattatttttgtttttgtagtattttagggtagtagtgggagatatttttttgagtataagtgggggaataagtttattagagttattgtttattagattgttttgaataagatgattttttgtaaaaggttttaattttggagtgtatgtagattatgatattatggtagtgatatattttgattagtatttttaaattaaaagtagagaaggagagattttttttattttttatatttatgtatatattgtttgtgtattttttggaatgaaatagagttttggtagttattgttttatagttaaagagaagattttttatttttattaattgatatttagtttgatatgtttatatataataaataattatttatttttaatatatttagattattttatttatatgtgatttttaatgttgtgggggaaaaatattttgaaagtattaattattaattgtttttattgttttattttttattttttttttttttgtttaagtttgatattatgttttttttattttaaaagttgtttaagattatttaaaaattaatatatttttttaaaatttgttttgattttataaattttttttttttttatagttttattttgaattaaggtttgttattaattatgatgtttatagtatagtatattttttatatggttaaaaaaatttatttaattataatttaatatgttataatttttattaatttgttaggtgtttattaaaataaaaatgtaaatgaagtaagattagtaatattttgttttaagatataaattatttatgttagattttaaagattttatgtttatttttagtaattataaaattattttaaaatgtaatattttttttaagtttatagtttagtttttaatttttggtattattatgatgtttttagttaattttaaagtgatttggaattttagttttttattttggggttttgatgagtttttaaaaagtagtaatatatttttatttatttttttttttgattaatgatattgatttgtatgattgtgaatttaaattaaaaataaaattatgtatagttaggttattatgattttaataaaattgagaaattatattttaggatagaatttatttgtttttaattaaaattttattattggtagtttgttaaggaaattttttttttgatttaatttttttataaaaggtagttatttttaaattgtatattttgatgtgaattggtttattagatgtttttttgatataaaaaggatttgaattaggaagataatagtaaagataggttttgaagatgggaattgatgaggaaggggttattttgatagaaaaaaagaaaaaagtaatatttttgaatagagttatagatttaataagaatgttttattttaggtagggattaaattaatgattttggttttattaatgaatgttatgaattatttaagtgtatagatagataatattgaaaattattataaatttataaatggaaagtattttgttttaagaataagattgatatagtgattatattttgtgttttatggaagtttatgaaaagtatttatatttattttgtaaataaaaaaagattttttatatttgatgttgtagtaattttatttttaattttattttgaaattttggatgagattattttttttggtataaagagtattattttaattaggatatttaagagttagttttggtaataaggttgagtttattattggattttggtaggttaatttatgggaagtgaaatgataggtgtatttttggaggatggagtagaagtgtagaggtagagataaattgtattgtatagttgtttttttattttttttttataatttatattttagatataggtttatgtgtttttaatgggatattgttaaaaggttgttgtatataagatgaatgttattaaaggtgtaaaaattgtattaaggtttatgtagtttaaatatgaaagtaaaggtagatttttatttatttagtttttggtaaatttataagtttatatttgttttatttttgtagatatatttgtttttttgtttttgtggaaggatattttgttgatatggtaggatattttgggagtttttaggagtttagaataaatttttattttgattatgtgtttgagagattaatttaatttttgagaaagtttatttattgtgtttttttttttttgattttataatggagtttaaagtattgtttttgtttatttttttttttaggttttttaaggttaagttaaataatttgtatatgttttgatttttttagaagaaaaggatttaatttaatatattgttattatattgttaaataagttatttatttaaataaaatgtttaattttgatgtatttagtgtttttatagttaataaggattaattgtaaagtagagatagatattttaggtattggtataaattttatattttaaaagaaatttttagaattgaattatttgttgaattattttgttaattattattatggattttttattttgggaaagttaaaggaaataaaaaagtaagaattaaaagatttttatatttgtaattttttattatggatttaggttgtataggtatttatgaaatttatgaagattaatagtaagaatgtaattgaaaagaattagagggagtatagttttttttttaatttttttatttttggttataataagtataattgtgatttgatttattttagtgttatttttgagtttttatgatgttttgtttaaatttttattataatatttattatggtgtagaatattattttatttttttgtaattttaatggtagtggtttatttatgatatttatttttggaaatttttttttttttttttgtattgtttttttttgtttatttttaatagtattttgtatagaagaaaagttaggtaaatatttgataaattaatgaatggtgaataaatgaatgaatgatgatatttatggaaaaggattatagaaaataataaattatttaaattgttttttaattagttattgggtgttgttgttttatatataatttttaaaagttgaatgttagataatatttatagaagggaagttaaaaaattaatttttttatttatattttattgataagttttagaaaaggatatatttttattatgattaatggaaaaggaaattatttggattttttatttgaatattataaaattttttttttttgtggaagatttaaatttagttaattttattatatattatttagaaatggagttataaataaaagtgtattttaagaaatatttttttttttgttagagttattagttaaatatttttatttgtatgggaatatataaaatgattattaaaagattaatgggaagttataaaatatttgtttagtattatttttatatattgagtatattttttttaagaatattattagtaattttaaaattgtttataaaatagtaagtttttatttaaaagtttggtagaatatttaatgattaatttattttttaaagaaaatttattatatgttatgataaatgttttattatttgaatataggtgttttagggaaatttgtgtagatttagatagttgtatggtattgttatttttaatttttaaaaatttttttttttttgttagtgttagttataatttaaggtaatgaaagagttatttgttttatttaatttaaaattagtattgttaaagttattggagaagttggttttttttattagaaaagattttagatttgttataaattatttttagattagaggttatggtaagatatgttttttttattttttttttatttttgtgtaggagttttattttagtaaaataaaaatatagttagatttggggttattttattataattatttgaagttttttgttttataatattttatgaaggtgtgggttttttaaattaaagagaattttgattatttaaaatttttaattaatgtttaaatagattttaatttgttatttgggattttggttagatgatattttgattttgatttttattaaataatgagtaaagatttattttagttgttatatttgatgtttgaattatttgaattttttttttttttttttgagatagggttttattttgttatttaggttggaatgtagtggtatgattatggattattgtagttttaatttttaaggttttagaaatttttttattttagttttttgaatggttgggattataggtatgtattattatattttgttaatttttgtattttttgtaaagatggagttttgttttgttggttaggttgattttgaatttttgggtttaagtaatttgtttgtataggttttttaaagtgttgagattataggggtgtgttattatatttggtttaaattatttggttttaaatatttgttagatttttaagtgaatggtaggtatggtagagaatttttttgttatttttttattgtaatttatatttatatatatttttattttttttaatatatataaaagtatattatatatataagttttgttttgagtatagttttttttttgtggttaagtaataaattattttaaattgatgtgtttaggaggatggttatgatttatttaaattttttttttttttatttggtattttttattattttatttgttttttgattttatgagatttattattaggttataaagatgttataattttggaatagaaagggaaaagttattaattataatagtttttagaatatttttatttatggtaatattaaatattataaaatttttttttttataatagattttggaagttgggtgttatttttaagttttaggttaataaattaaaatagaaagaggagttgaatgaaaattagaaaaagtatagtttttatttaagaagtattttatatttttttatataaatttaaattttttttaaaattttatgattttttttagattatgttaatgtttaagttgtataggagaaagaattgtggtagaaaagaaaaataaagtaaaagagaagttgggagagaaaaattataaaatttaattataatttattgagaataaaatttaaaattaattatgaaaaaattaaaaataaaaatattgaaaaaggttaaatattttattggaaaatggtgaatgttatattataaatttataagaaggtattatatatagttaaagaaaggaaaaatagttaagaaataaaataagaaagtaataagtgaaggaatggtaaaatttagaaatatgaaagtagataagatgttaaaaaatttttaaaagttttgaggttagaggtaaaattttggaaggggatttggagaaagtttgaataaatgtaatgtatttgtaatgttttttattaatttaatatattttatgattttaagaatataaaatttaatttatataattttttggttattaaagttattatgttaggtaaattaaaaagtatagttgttttagattattgtaatttaaaaaattttaattaattattaattgtagaatttattgatagtttatgagaaataaaagaagttatatattttattatataataaatgatgtttatgggtttttatttttttttgtttagtggattaaaaaaagaaaaaattttttagatgttaaggagtggaaaggaaaagaaaatatttattggataaagtttgtgttttatataggttggtttaattagtaaatataaatatgaagtattgagattaagggtttggtggttattgattaggtatatatgtttaggatagtttttgagttttaaattttatttttaaaatgagggagttggattagaatattatttatgtttgatttaatatgattgtttaaaagttattgtaagttgggtgtggtggtttatgtttgtaattttagaattttgggatgtagaggtgggtagattataaggttaggagattaagattattttggttaatatggtgaaagtttatttttattaaaaatataaaaaaaattagttgggtgtggtgatatgtatttgtagttttagttatttgggaggttgaggtagaatagtttgaatttttgaagtagaggttgtagtgagttgagattgtgttattgtattttagtttggtgatagagtaagattttgttttaaaaaaaaaaaaaaaaaaaaagttattgtagtggatgttgtggttttttatttagatagttttttttaaagttttttaagaatgaagtattgatttttttagttgttggggttattggttgatagtgtttagttgtatttttttttaggaattgtttttgattaaagagatttatttaatttaaggttatattttattttgggagtaggtttgtatttaatgttttatatttaatgattggtttataaagagatgtaaaggttgagtttttttgttttaatttgggatatggttgtatggttattttagttttaaagtttttaatggtgttagttgaggtttttgtggtaattgtattatagtttaatttttttttttgtttgtttaattttgtttttttttttttttaataggttgaatttgagagtataatttaataaatttgatgttttaataaatttatattttagggtttgtttttgtaggaatttaatgtaggagaaattttaaatattttttatttttgtgaaaatattagtgttttttggagatatatttttattttgagatttggattgtagtttttgtttttagtaattaggaattatgaagttagtaatattgtttaataattatttttataaattattttaaaattattttagagtaataaggattaggtagaaatatagaaatgttatatattaagatgtttatttattattttaatagtaaaaatgtatattatattgtaattttaaaaaataaatgagtgaattttttaagtttttgattttttaagaaaaataaatgttagtattaataattgaaaaatagagaaagttattaggatggggaaaagttaagtaaaaatatagaaagtaaaagattttattaataataagaggtaaaaaataaagtatttttaaggaggagttgattaaattaaaaagtgaaatataaatgaaagaaagtattatatttgtataaatttagaattatggaaaaagaaaattaaaataagtatataataaatgttattgtttaaaatgtttatattttattaaattaattaaagtttttataattttttttgaatttgatattttttttttttaaggtgtttttttaagaattttggtgtttttatttttttttttttaattttttttttttgttttattgtttttttttttagtgtatatagatttttatatgtttagtatatttttagtgagataagttaatatatttttttgttattgaggtattttttttgtttgttttatatttttgttttttttttgtataagttaattttttttgataaaaaaaaaaaaagaaaaaaagaaatttgaaattgattttgaagaggtagtttggtaaatagatatatattttttaatatgagtttaattggtttttttataatttaaaaatgaattgtttattaaataaagtagatgttttagagatatgttaagtttggtaataggagaaattatggatgttgttaaagtagtaatagttgattttatagttatggaatgattttgtatttgatttttgttaagataatagagggttttatttattgtttttagttttggtttgtttaagtaggtattgttttttgtttatttattttttagttttaggtttggaataatgttgaatatagtgttataggttttggtgttagataggattaggggttgtggaatatttatagtttttttttttttgtttttataaatgaaatggatagtttgaatggagaaaattaagggttagttggttaaaaatataattggtagtaaaatagttgggttttttttaagagttggtgtttaaagagaggttatttaaagagtaaagtttatttattataatagtgggttaggatattagttgtaggatgaaataatgtaattttatttaaaatgatttttgtttttaaagtttggaaattagatgtgtttttttttttttaagaaattttttagttttagggttaattttttaaaatagttaatttttttatttataataaataataaatgtataattttgagaatgttaaataaattatgtgttatgttggttaaagttttatttttgtttaagtttatgtaaatatataaaaataaaattaagaaattgagatgggaaaagataggaataaaaaatgatttaagaatttagatgggatagtatggaagatagttagatatttaaattaatttgagaggttattaatatattatgaggttaattgataaatataatttttttttttttttttttttaataaaatgttattttaattttgttgtttaagaaaaaatgtaataatttttttgggggaaaatttatattgaagtatttggtaattagtatataaatgttaatgtttttttttttttttttgtaggttttgatgatgataattttaggttggttatttatttaattttaaaatttttgataagtgttaaattagaaatatgtataatattatatttagggagatagatttatattttaaataattttgtatattgtgagattattttttttttatagtttaggagtagatgaatttgaaggtgattttgtgaagttgtttttttttgtatatatatatatgtataaatgattggaaagagaaatgaaagagggttttagataaaaaggaaaggtgtttagttagataggtgtatttagtagtagttttttgatgttataattttgaaaatagataaagttattagtttgagagtttttggaaggtattatttttatatagggtatgattttgtaggagaagttttttagtagttattttttggttagtttgtggaagatgattagtggaaggtagaagaagatgatgagaaagttttagaaggttaggttggttaagagggagttggagatgttttgtatgtagtagttgtggtatatgatgtatattattgttaggttgttaatgatgttggttttgaagattattatggatagatatatgattgtgtaggttttataggatttttgggttagtgggtagaaggggttttttagttttatatgttggtttgtgttgtttttttggtggggatttttaggtttatggatttttttatttaaggatttattttgggttagtgtttggtttgggagtgtaattgtttattttttgtgttttgttagtttattggttgttttggataggggtttgtggtgggaattttggagttttttggttttttttggttagtaaaaaagattgttggttttggggattgtttttatattttgtttttggttatgtttggaaatgttagtgtttttgggattttttttttttttttttgagatttgaaggaagagttggagggttgtggggttttttttttttaaagttttagaaggtttttgattttgagtatttttttatttttaggggttaggtggtttggttggaggttttgggggtttggttgttgatgtttttgtttttttgtttgtagttgggttatggtttggggttgttggtaggttttaggagggttttgtaagaaatgttgttttttgtttttttttgggtgtttgggtttgtagaatgttttttgtagaattttttggtttttaggtgtttttgttgtggtgttggattattgtaggtgtatagtttttttttagataagttttgtttttggatgtaggggtgattttgagggtagaagaggtagatattttgagtagtagtagaagtagtagttgtgatatgtgggtgagaagtgtgtttggggtttgtatggtttggtgagggtatatttggtagttgtagtttttgtttagttaggattgatatttgttgttgaagttgttgttgagagttaggtatatgttatatatttatttttgtttgggtagtggggaattggagattagggtgatagtggaagattggttttgggggttatatatatgttttttataatttttttttttttggtattttgtgtattttttagttaagttgagttttagtaaggtatgttttttaaggtttttagagggaataggttatttttggtggttgattttgaaaagttgtaattaatatttgattgttgattattgttgagatttgggggagtttagatgaagttttatattttttattgtttttgggtgggggtggtggtttttttggtaatagttgttttgtttatttatatttttttgatagtgtttgatttagttgtaagttgaggtttttagaggaaaagaaaaataagttttttttttttagatgatttgtagttataattttgtttttagtttgttggaaatatgttgtaaatagtttgaagtagtgttgatgtgttggtgaaatttttgttttatttaattttagtgatttgtgagtttattgttgttgaggagaagtgggattttaattttgtggttattgttaaagttgttttttttttagtttaaagttgatgatggggtgaagtaggttgttggatggtgtgttgttgtagagaaggaaattgtggggagaagggggagaagagggtgttgtttgttggtggatagtgttgttagttgtgggagttagttattgttatagtgggtttagtttggatgggaagggtggtgtttggaattgttgtgggttaggtagtgtgtggttgggaaggggaggtggtttggttttgtttttgtgttttagttgttgtgtgtgtttgtgaagtttgatttttggtttgttgtttttttttatttttttgttttttttttggagagatattggtttgtggggagatgggattttttggtggtttattatttattaaatttatatatgttttatttaagttatttgtagtggtttttatttggaggagttgggagggaataagggtggaggtgtggagtttgtgtggtttgaggttagggatgggtgggataggttaattttttagttgttgaaattagtttgataggtttttgagtttgggttaggggtgggtgtggggtgggagtggggggtgggggtgggaatgggaatatgagagtggttgggggagggaagagaggagggtagtaggggagtgagtagtagggttttttttaatttgttgtggttgatgtgtatgtttaggttttagttttggggggtgaggggtggggtgggggaggggtggatgggggttgggttgtggggagtaagaaggtgaaattttatttttttaggtattttttagagataggagagaatgggagtttagaggtgttagttatagagaattattagttttaggattgagatgtagagtgagaaagtttaggatgtattattatttttaatattgagttgggaagtattttattatgggttattttgtattatttagagtatagtgaggtagttgtatttgatgaagtagtgggaaatgattggaggtagaaaattatttgaatagtatttttagtatggttgtttatgtttttttaatttttttattatattttataattttgttaaaattgttagggtatagttaataaaatagataaattaatgaagagaaaatgatagaggaagaaataaatatattttgaattttttttttaaatagagttttgttgtgttgtttaggttggagtgtagtggtgtgattttgatttattgtaatttttgtttttttgggtttaagtgatttttttgttttagttttttaagtagttgagattataggtatttgttattatgtttggttaattttttttgtatttttagtaga

SEQ ID NO: 303 - DNA, 3128 bp, Artificial Sequence
  chemically treated genomic DNA (Homo sapiens)
gaggggagttttggtgtgttagaattagttgtgtttgttgagagttttttgtgggtggggagagttttttatttttttgtttgtttgagtgtttagagtttagggttgttgattgtagtattttttgatttgttgtattgaggtttgtggtttttgtgtgtggtttttattgttgttggaggtggttgtaggtgaattgttgggttgttagttatgatttgagttaggtatttttttgtttttgggattggggttgaaggttaattatattgtagttaggttttgtgattggatggtagtgagagttgattggttgttgttgtgagttttgggtttttttttttttttttttgttttaattttagtgtttaagttttaggttaatgagatagtgttttatagatgttttttttttgtttttttttttttattttggagagggaggggaagttttgattggttagattgtttttggaagtttttttttttttattaattattgaaggaggtatgtttttagtggagttttttagttaattataaagtggtggtggtgtttagttgtgtagttttattagtgtttttgggttttattgtttttaattttttaagtttttttgtaagggttggtgattttgattggttattgttgttattgttgaatgttttttttagttagttattgaataaggtgaatttattttttttgtttggttatttttggtattttttgttttttgggtgtggttttttagtgttattttttaattggttttttaggttgattggttttttttgggaggagttgtaaataaatgatgtttgtgattggttttgtttggattttggtttttagttgaagtgggtgagtgtggggtttggttggtgatttttagatgtttgttatgtgggtggtggggtgttgggtggtgtaaggttgggtgggggaggaaggaggtggaggatgagtaggaggggggaggaggagtggggaagtgtaaggtgtgttggtagatagtgttttttatatagagtagtttttgatttgggtgaatgtgggttttgtgttgttgttgttgttgttgttgtttgggttaagtgataaaggaaggaaggaagtgaggaggagttggttttgtagttgttgatagggttttgggttggggtaaagtgtggatattttttgagtgggtattgagtagagttgaggggtgggagggtggttgagttgttgttgtggatgggggagggggttttgagggatggaagtggttgttgggtttttatgtttttggtgaatggggaatagttgaggagttgttgtttggggtttgaagggagttgtttttgttattgttatggttgttggatttagttgttgtttgtagttgtttttggtgtaatgaggagaggagttgttgttattgttattgtttgtttttgattgatttgtgattttgttgttttttagtttgttgggtttttgttgttagtttgttggattttgtggtttgttggagttgtagtgttttttgttgtatttttgagttatttttttttttttttttttttttttttatttatttttttttttttttaagtgtgagatttgtgatttttttgttgttttttttttttattgatttggaaaaaaaatttttgaggaaaatataatatttgaagtatttatttttaattaagtatttgtttttgttttatgtgatatatatttttttaggatttgtttttttttttttttttttttaggaaagggaggggaaagaattgtatttttttttaagttttaaattatttatatgttaaatatttgtgttgatttgttttgaaggagaaatatattgtttgttttgttttttatagtatataaaaggagtgaaaagttaagaggatgaagttttttttttttttttttgtgggagaatttaatgttgtatttattgttaatttaatattttaatataaagataaaaggaagaaaaggaggaaggaaggaaaaggtgatttgtgaagagagtgattatgttagggtggtttagaattattttttttgtggagagttgtaagttggtgtagtagtttttagtttttggtagtatgaaagttagtagtgagtattggttttattttatattttttttttattttgtttttaaaataagaaattttgaaatattaggatttgaaattattagattttttgataaataggtaatggaaaagggtaaaatttatttttagttaaggatgaagtagttttttttttattttttttatatttttttttttggttttattaattttgaattgagataatatgatatttatttggatgatttgattttaaattgtttttttgtattttttttgttgttggtagttagttttattaagtgtttgagtgtttttatgttaaagtagtgatgatagtgtttatttgtttattttttagaataaagagaaggataagatttgattattaaattattatgtatatttgtagaatttttggaatttggaatgagagaatattttaggttttaggggttattatagtttgatatatttaatagagatgttaaatgttttatttttttaatattttttttttgtttgtatgattatatataatatttgtttttaatttgtggatgaatttttttagtaattatttatatttggaggttgttattgatttttttttttagaagggattagtgggagttaataaatatttagtagtagtaatatttttgtatgtatttgtgtttaattggataagtggtttgatgtgttattttttaatttttttgttttgatattattaatttgttattgtataatttatgtttaattaaaagttaatttggaagtattaataggtttaagttttgattgagatttgttttgttatagtgttaaatattaagttaaatgttgttattggtttattatatttaagtttaattttggagtgttattgtatttattatttgttaaatgttttggtgggttttttaaaaaggatgatttaaaatattttagtgttagtttttattatatttagataattgtggatttagttagaagaatgtggatttagttttttt

SEQ ID NO: 304 - DNA, 3128 bp, Artificial Sequence
  chemically treated genomic DNA (Homo sapiens)
gaaaggattaaatttatatttttttaattaaatttatagttatttaaatatgatggaaattaatgttagagtgttttaaattgttttttttaaggaatttgttagaatatttaataggtaatgaatgtagtagtattttaaaattgaatttaaatgtaatgagttagtgataatatttaatttagtatttggtattatgataaaataaattttaattaaaatttggatttattaatatttttaagttaatttttgattaaatataaattatatggtggtaggttggtaatgttaaaataggaaggttaagagataatatattaaattatttatttaattgaatataaatgtatatagagatgttattgttgttaggtatttattggtttttattagttttttttaaagagagaaattaatggtagtttttaaatgtgaatggttattgaggaagtttatttatagattaagaataaatattatgtgtagttatataaataagaaaaaaatgttgggagggtgggatatttaatgtttttattaagtatattaaattatgataatttttgagatttaaaatatttttttattttaaattttaaaaattttgtaaatgtgtataatggtttagtaattaaattttgtttttttttttattttaaaggatgggtaagtaaatattgttattattattttaatgtggaaatatttgagtatttgatgaaattgattattaatagtaagaaaagtataagaaagtagtttgaaattgaattatttaaataaatattatattattttaatttaaggttaatgagattgggggagggggtatgggaggagtaaaaagggagttgttttatttttgattgaagataggttttgtttttttttattgtttgtttattaggaggtttaataattttagattttggtattttgaggttttttattttaagggtgaggtggaaaaggggtgtaaaataaaattaatatttattgttaatttttatgttgttaaaagttgaaggttgttgtattggtttgtagttttttgtaaaggaggtggttttgggttgttttgatatgattattttttttgtgaattattttttttttttttttttttttttttttttttgtttttatgttggggtgttaggttaatgataaatgtagtattaagtttttttatagaagaaaaagaaaaagattttgtttttttggttttttattttttttgtatattataaaaaataaaataagtgatatattttttttttaagatagattggtatggatatttaatatatagatgatttaggatttgggaaaaaatataattttttttttttttttttttgggaggagagaaaagagagggtaaattttaaaaaaatatgtattatgtgaaatgggggtaaatatttgattgaaaatgagtattttgaatattatattttttttggggattttttttttgagttaatgaagaagggaagtggtggaaggattatgagttttatgtttgaagagaaagggggatgggtaggagggagggagagggagggagggggtggtttggagatgtgatgggaaatgttgtagttttggtaagttgtgggatttggtgggttgatggtaggggtttggtgaattagagggtggtggagttgtgagttagttagaggtgggtggtggtggtggtggtggtttttttttttattgtgttaggagtagttgtaggtggtggttggatttagtggttatggtggtggtggaggtagttttttttagattttaggtagtggttttttgattgttttttatttgttggggatatgggaatttggtaattgtttttgttttttggggtttttttttttgtttgtggtaatagtttggttgtttttttgttttttggttttgtttggtgtttgtttaggaagtgtttgtgttttgttttagtttagagttttgttagtggttgtggggttggtttttttttgttttttttttttttttgttatttggtttgggtggtggtggtggtggtggtggtataaagtttgtatttgtttgggttaggagttgttttgtgtgaggagtgttgtttgttgatgtgttttgtatttttttattttttttttttttttttatttgttttttatttttttttttttttatttagttttatattgtttagtgttttgttgtttgtgtaataggtgtttgggaattgttggttgagttttatgtttgtttgttttggttgggagttgaagtttgaatggagttaattatggatgttgtttgtttgtggttttttttggaaaaagttgattagtttgagaaattaattagaaagtgatgttgggaagttatgtttaaagagtggaaaatgttgaaggtagttgaatggaaagggtgaatttgttttgtttggtggttggttggaggagatatttgataatggtaatagtggttaattagagttgttggtttttatgaagaggtttgaagagttgaggatggtgaaatttagagatgttggtgaaattgtatggttgggtgttgttgttgttttgtgattggttggaaaattttgttgggagtgtattttttttggtgattggtgaagagaagggggtttttgaggatagtttggttagttaggattttttttttttttttaaggtggggagaagaaagtgaagggagggtgtttataaagtgttgttttattggtttgaagtttaggtgttggagttggggtaaaagggagagggagggagtttgaaatttgtggtggtggttaattggtttttattgttgtttaattgtaagatttagttgtagtgtgattggtttttggttttggttttaggagtggggagatgtttgatttgggttgtggttgatgatttgatggtttgtttgtggttgtttttaataatggtggaaattgtatatagggattgtgggttttggtgtagtaaattggaaagtgttgtggttggtggttttgggttttgagtgtttaagtgagtagaggggtggagggttttttttatttataggaggtttttggtgggtgtagttaattttgatgtgttaaggtttttttt

SEQ ID NO: 305 - DNA, 3030 bp, Artificial Sequence
  chemically treated genomic DNA (Homo sapiens)
tttttgaaaattgttaataaaaatttgttggttttatggtttagggggtattatggaatttgtggatatgtgatgttttttttggatatttggttttaaaatgttttttttttgtattttttttttttattttttaggttagttgatatttagggaaaataggaaaggatttatgtgaaatattgggggttgaattttttttgataataagttttttaaaaaagatttttaaatgaaatttttttgttttttaatttttatttttgttttgggggtatatgtgaaggtttgttatataagtaaatttgtgtttttggtgtttgttgtatagaatattttattatttaggtattatgttgagtatttaatagtttttttttttgtttttttttttttttttattttgtattttggagttaattatagtgtttgttgtttttttgtttgtgttataagtttttattatttagtttttatttataagtgagaatatttagtatttggatttttgtttttgtattagtttgttaaggataatagtttttagttttatttatgttttataaaagatatgatttagttttttttaatggttgtattaaatgaagttttaaagatataatataaatattaattttttttttattataaaaattttttgttgaatttgattatatttaaattaatgagttttgttttatgaaagattttttggataaatttgatagttgatggaataggagaagttgtttgttatgtttaaagttaataagagattaatatttagaataaatggagatttgtaaattaatagaaagtaggtagtaaagttaaagaaaatagtttaaggtatagttattaaaaggaatgtgattatgttttttgtagggatatgggtggagttggaagttgttagttttagtaaatttatataggaatagaaaattagtgagattgtatggttttatttataagtgggagttgaataatgagaatatatggttatatggtggtgattaatatatattggtgtttgttgagtggggtgttggggagggagagtattaggaagaatagttaagggatattgggtttaatatttgggtgatgggatgatttgtatagtaaattattatggtgtatatatttatgtaataaatttgtatattttttatatgtattttagaattttaaataaaagttggatggttaggtgtggtggtttatgtttgtaattttagtatttttgggaagttgaggtgtgtagattatttaaggttaggagtttgagattagtttggttaatatggtgaaattttgtttttattaaaaatataaaaattagttagatgtggtatgttatttataattttatttatttgggaggttgaagtagaattgtttgaatttgagagtggaggttgtagtgagttgttgagattgtgttattgtattttagtttgggttatagtgtgagattatgttataaaataaaataaaataatataaaataaaataaaataaaataaaataaaataaaataaaataaaataaaataaaaaaataaaataaaataaaataaaataaaataaagtaatttttttttttttaagtggtttttattttttttttttgttttgtgaagtgggtgtgtaagttttgggattgtagtggttttagggaatttttttttgtgatgttttggtgtgttagtttgttgtgtatattttgttgtggttttttttttgttgtttgtttattttttaggttttgttgggatttgggaaagagggaaaggtttttttggttagttgtgtggtgattttggggattttagggtgtttttttgtggttgatgtttggggtgtagtggttgttggggttggggttggtgggagtttgtgggattttttagaagagtggttggtgttgtgatttagtattggggtggagtggggtgggattatttttataaggtttggaggttgtgaggttttgttggagttttgttgttgtagtttttgttattagtgagtatgtgtggtttgtgtttttggggatggggtttagagtttttagtatggggttaatttgtagtattaggtttgggtttttggtaggttttttgtttattttgagatttgggatgggggtttaggggatttaggatgtttttagtgttgttagtggtttttagggggtttggagtgttttggggagggatgggattttgggggtggggagggggggtagattgtgtttattgtgttttggtatttttttttgggttttagtaaatttttttttgtttgttgtagtgttgttttatattgtggtttattttttagtttgaggtaggagtatgtgtttggtagggaagggaggtaggggttggggttgtagtttatagttttttgtttatttggagagatttgaatttttttatttttttgttgtgtggtttttattttgggttttttttttgttttttgttttttttgttatgtttgttttttgttttagtgttgtgtgaaatttttggaggaatttgtttttttgttttttttttgtatttttgatttttttttgggttgttgtgaggtggagttggtttggtttttatattttgtatttttttttttttgtagttgtggttttgtgtatgttgttggtagattagggttagagttggaaggaggaggtggtgattgtggagatgtggtaggagggtttatttaaagttttttgtgtaagtgattatgtttgggtaaggggagggggtgttgggttttagggggttgtgattaggattgggggatgtttaagtttagtgtttttttttgagttatgttttttttaatagttatatgggtagttttttaagttttaggatggagattttattttgtattagtttaatattattttgtgttatttgggttgtatttttggtgagttttgaatttttaagtttagggtaggtatgggtaagtttttgtttttggagtttttttgtttaaattagttgtt

SEQ ID NO: 306 - DNA, 3030 bp, Artificial Sequence
  chemically treated genomic DNA (Homo sapiens)
ggtagttgatttaaataaaagggttttgggggtagaggtttgtttatgtttgttttggatttggaggtttaagatttattaagggtgtggtttaggtgatgtaggatggtattggattggtatagggtgaggtttttgttttggaatttggggagttgtttgtatagttgttgggggaggtatggtttagggaggggtattgagtttgggtgttttttgattttagttatagttttttaaggtttagtattttttttttttgtttgggtatggttatttatgtaggaggttttgagtgagtttttttgttatgtttttatggttattattttttttttttagttttggttttgatttgttagtagtatgtgtagggttgtggttgtggggagggagaagtatgagatgtggggattgggttgattttgttttgtagtaatttggggaggggttaggagtgtagggagggaatagggaaataggtttttttgaagattttatataatattggggtggggagtaggtatggtgggagaggtggggaataggaaggaggtttggggtaaaagttatatgatggagggataagggggtttggatttttttgggtgggtgaggggttgtgggttgtagttttagtttttgttttttttttttgttagatatatgtttttattttgaattgggaaatagattatggtgtagggtggtattgtagtgaataaagaaaagtttgttggagtttgggggaggatgttaaggtgtggtgagtgtagtttgttttttttttttgtttttggggttttatttttttttgaggtgttttgggttttttgaaagttgttaatggtattggggatgttttgggttttttaggtttttgttttgggttttgaggtgggtgaggagtttgttgggagtttgggtttgatgttgtgggttggttttatgttgggagttttgagttttatttttggggatgtgggttgtgtgtatttattggtggtgaagattgtggtggtgaaattttagtgaagttttgtggtttttgagttttataagggtggttttgttttgttttgttttagtgttgagttatggtgttggttgtttttttggagggttttgtggatttttgttggttttagttttggtggttgttgtattttgggtgttggttgtagaggggtgttttggagtttttggagttgttgtgtagttggttggggaagttttttttttttttttaggttttagtggggtttagggagtaaatagatagtaggaagaggattgtagtgaagtgtgtgtagtgaattggtgtgttgggatattgtggggggaaattttttaagattgttgtgattttggagtttgtatatttgttttatagggtaggggagaggggtggaggttgtttagaggaaaggaaattgttttattttattttattttattttattttatttttttattttattttattttattttattttattttattttattttattttattttgtgttattttattttattttatgatgtagttttatgttgtggtttaggttggagtgtagtggtgtgattttggtggtttattgtaatttttgtttttgggtttaagtaattttgttttagttttttgagtaggtggaattataggtggtgtgttatatttggttgatttttgtatttttagtagagatggggttttattatgttggttgggttggttttgaatttttgattttaggtgatttgtatgttttggttttttaagagtgttgggattataggtgtgagttattatgtttggttgtttaatttttatttgaagttttggggtatatgtagaggatgtgtaggtttgttatataggtgtgtgtgttatgatggtttgttgtatagattattttattatttaggtattaagtttagtattttttagttattttttttggtattttttttttttagtattttgtttaataggtattagtgtgtgttgattgttgttatgtgattatgtgtttttattgtttagtttttatttataagtgagattatgtggttttgttggttttttgtttttgtgtgagtttgttgaggttaatggtttttagttttatttatgtttttgtaaaggatatgattatgttttttttagtggttgtgttttaggttattttttttggttttgttgtttattttttgttgatttgtagatttttatttattttagatattgattttttgttggttttagatatgatagatagttttttttattttattaattgttaagtttgtttaaggagttttttatgaaataaaatttgttaatttaagtgtaattaaatttagtaagggatttttgtggtggggaagaggttggtgtttatgttgtatttttaaaattttatttaatgtagttattaaaaagaattagattatgttttttgtgggatatggatggagttagaggttattatttttagtaaattaatgtaggaatagaaatttaaatattggatgtttttatttgtaagtgggagttaaatgatgagaatttataatataaataaggaaataatagatattgtggttgattttagggtgtaggatgggaggaaggagaggagtagaaaagagaattattgggtatttggtataatatttgggtgatgaaatattttgtataataaatattgaagatatgagtttatttatgtaataaatttttatatgtatttttaaaatagaaataaaagttaaaaaataaagaaattttatttaaaagttttttttaagagatttattattgggggaaatttagtttttaatattttatgtgggtttttttttattttttttaagtgttggttggtttgagaaataaagggaaagagtataaaagagagatattttaaagttgggtgtttaggggagatattatatgtttgtaggttttgtgatgttttttgagttgtaaaattagtgagtttttattagtaatttttaaaga

SEQ ID NO: 307 - DNA, 1631 bp, Artificial Sequence
  chemically treated genomic DNA (Homo sapiens)
ggatttagaatatggggtggatttaggtagtggtgggaattaggtggatttgtttggattgaagtttttgttaggtattgaagttgtgaagttgtttgtgtagtaaagggagtttttggggggtgtttgagattttggtgttgtttgggggttgttggtagttgtgtttgttgttttttgtttggtgatttagttggtatttttggtggggttatgggggttagaggatagtgtggggggtggtgagtgtggttgttaagttttttaaggttttggagggataggatttgggtgtattttattggttgttatggtaatgtagtgttttagttttttgtgttttgtggtggagggaggtgtagttaattggaagtggtggagtttttggggatttttttttttttgttttatgttgtgtgtgggtgggggttaggaggtgtggggtggaggtggagtgtgggttgtggagatttggtgtttgtaggaggtttggtgtgtggtggggttgtatggggttatttttggagtagtattgtgagtagtggtgtgatagtgtggggtttttttttttttagaagagatgttatttatataaatttgatttttatgtggggtgtgggattttgtggggttttagttgtaggtgtttttgttgttttttttgggtgggtgggttggagaagaagtttatgtgggattttttaaaatggtgtatagggggattttagggttttatggttatttttttggattttttggaggtgttgtttagttatttttagttgttttgatgatttgttgtgggtttttttaggagatttgaaagtttagggtgggttgtgtgggtaatatttttgtttaggtttttggagggttttatgtggttgtttttggagtattttagagtgttagggttgtgggaaggggtgggtgtgtttttggaaatatgagtgtttgttagtattagtgtttggatagggttggggataaattagtttatgttgtgtatattgaatttatgtgtttgagtgagggtgggtgtgttggggagtgtgtttaagtggatagtgttgtatagtaatgtttatggggagttttaggagagtttggttatttttgtgtaggataattttttttttattatttgagttttgtgtttgtgggtaggatttttttgaattggggttgtgtgtttagaaatatgtatatgggagtgtttagtttaaagttttagggtttttgggatttgtgtgtttggggttggggttttaggtgggtataggtgggagggtgaatttgtgggtagggtgggtttttttttgtgggtttagtatttgtgtgtttttagtttaggtgtgtgggaggaaggtagtggtttgttgtgtagagttttgtgtgtttgtgaggtggtgttatagttgtagtagtgtttgttggtttgggttgttttagataagagtgtgtggaaagtgtggtggggttgagatgtgattaggatgtggggaggatggattagtaggatagattgattgggggtttggtgggtggagggtagtgtagttatgttttttttggatttgttgttagttgggtttggggtttttgatatgttttttaggtgggtttttgag

SEQ ID NO: 308 - DNA, 1631 bp, Artificial Sequence
  chemically treated genomic DNA (Homo sapiens)
tttgaggatttatttggggggtatgttgaaagttttgggtttggttgatggtggatttaggggggatgtggttgtgttgttttttgtttgttgggtttttggttggtttgttttgttggtttgttttttttgtgttttggttgtgttttagttttgttgtgttttttgtatatttttatttggagtggtttgggttggtgggtgttgttgtggttatggtgttattttgtgggtgtgtagggttttgtgtggtaggttgttgttttttttttgtgtatttgagttggaggtgtatagatgttgagtttgtggggaggggtttattttatttgtaggtttgtttttttatttgtatttatttgggattttgattttggatatgtgagttttagaaattttggggttttgagttgagtgtttttatgtatgtatttttaggtatatagttttagtttggaaaagttttgtttgtgagtatgggatttgggtggtgggggagaggttattttgtgtaggagtagttgagtttttttggaattttttgtagatattattgtatggtattgtttatttggatgtattttttaatatatttatttttatttaggtgtatggatttggtgtgtgtggtataaattgatttgtttttagttttatttaggtattgatattaataggtgtttatgtttttagaagtatatttgtttttttttgtagttttagtgttttgggatattttaggggtagttatgtagggttttttgggaatttgggtagaggtgttatttatatagtttgttttgaatttttgggttttttaaaggaatttatgatgagttattagggtgattggaagtggttggatagtgtttttggggggtttaaagaagtaattatggggttttagaatttttttgtatgttgttttgaagaattttgtgtggattttttttttaatttatttgtttgaaggaaataataggggtgtttgtggttgggattttgtaaggttttgtgttttatgtgaaggttaggtttgtgtgggtgatgttttttttgggagaaaggggattttgtattgttgtgttgttgtttgtagtattattttggaagtggttttgtgtagttttgttgtgtattaagttttttgtgaatgttggatttttgtggtttatgttttgtttttgttttgtattttttgatttttgtttatatatggtgtggagtgggggggggggggtttttgagaattttgttgtttttgattggttgtgtttttttttattgtggagtgtgaggggttggggtgttgtgttattatggtaattggtgaggtgtgtttagattttgtttttttgaggttttggagagtttagtaattgtgtttgttgttttttgtgttgttttttggtttttatggttttgttagaggtattggttgagttattgggtgaggggtagtgggtgtggttattagtggtttttgagtgatattaaggttttgggtgttttttggaggttttttttgttgtgtaggtgattttatggttttggtgtttggtggaggttttggtttaaatgagtttgtttgatttttgttgttgtttgagtttgttttatgttttggattt

SEQ ID NO: 309 - DNA, 3523 bp, Artificial Sequence
  chemically treated genomic DNA (Homo sapiens)
ttttgtttttgtttgttttttaatttttttttttgtttgtttttatttgggggtttttgtagttttaggggagtttggagttttgtaagtgtttgtgtatttattttttataaaataaaataaaataaaataaaataaaataaaataaaataaaataaaattttatatatagttaatattagtggtggagtggggtgtattgtatatatttagttttgttttataaggatgtttaaattggttttggagttttggggtgtgttttgaatgtgtttggggtttttgtgttagtgtttttgagttttttgattttgggatgtggggttgttggggaggaaagagttttgggttgagttttgttttgtgtttgggtgtttttgtttaagttttttgttagtaagttttgaagggtattattaaattatttttggttagtggaaagagggggtttaagagttggagtttggttttgttgtggttttttaagttgttttttagaataggaaggaagtttgaggaataaagggggttttaatagagtttagttttttggttttgtgtgtgtaattgttagtggaagagaagtagttttagttgaggtgagttaatttgggtgtgggtggaatattatagtttggggtaggtttttggttttggatttttgtttttagtttttgatagtgtttgtgttgttgttatagtagtgtttaggatttaatgaggggtttagggttatgggagttgttagagttttggtttttagatgtgttaggggtgtttgtaatgttgggtttttagtggggagattttatttgttttttagttatatttgtgatttatttgagttttttggagttgtggaaaataattatagagatattaggtattgttaaggaatgtttttattattgtttttattttatttttggaggtttaagtaagattttagtaatttgttttatggatttttagattttaggtagtttttgtggttgtagggagtttgggtttatttgttgggtttaaggagaattttttgatttggggtttggttggtttgaggaattggattttgtgatgaagattttttaggttggatatgtaagtaaattaaattgtaaattaatgatatgaaaattatatttatatgaaagaaaaattgattatggttataaaagtgtatggaatttgattttgttttggagaaatattatataaaagttatttttaatagatgtttgttatttaagagtggtagggatattgttttttatgtgtttgtaaaaatagagttgtaattgtagttgttgttgttgtgggtaggatttatttttttaattggttaaatggtttttttttttttttgaaggtgatatttgtatttttaaaatttagagttgttggtaggatggttagtattgattttaattttgatataaaaataagaggggttgtaaaatgggggaaataaagttgttgtaaataaaatgtaagttattatttttttttaattttttgtatttttgttgggtgtgtgattggtagttgatggtttaataattggtatattttaatggaattgtgagggaaatgtaataattttgttataatgggttgtaattttaatttgattttggtttttgtagtttttggttggaagttgggtgatgagttttgtttttagtgggtggtgtttgagtttggttgaatggtggtaattggtggtgggtatgtgtttggggtgtgtgtgttattttttttgtttttatttaatttttttattagtgtatgagtttatttttagaggttattaggtaggatttatgattggataataaaagtatgtgatttgaagttgtattttatatttgggtgtttatgtaggagggaattaagtatatgttttagttatttttataatttattataaattgtgtaagggtgttatagatgtataaatgattgtgagttataaattaagtatatatattaaaaaataaatgagtttttattttgtaaatttattttgtggttgttatttaaatggtttggattattagttgtataattatggagattatagttttgtgagtgagtaatttagggatttggtgagtatgtattttggtaggtatggttatggttataatggtatggattttagtgttggttgtttgggttttggttattttggttttggagagtgtgtttgtagttatgttgttagtgttagtgtggtgtttgttgagtttaggtatagttagttggttatgtttatgtattttttttagtttgatttgttgttttgttttgttgtggtttttttgtttggtagtgatagttattatggtgggaaaaattttttaagtaattttagtggtgttttggttgatgttggtagtatttatattagtagtagagagggggttggtatggtgtttggagttgaggaggatgtttttgttagtagtgagtaggtgagtgtgtagagtgagttgagtttggtgttgtttgtttaattttagatttatttttggatgtgtaagttgtatataagttatggtaaagttagtttttttttaaatttatgtgattgtggggatgtggtttttggtttttttttttttttttgttgtttttttttagttttttttggttttattttttttagttttgtggagttttttttgttgtttttttttttttgttttttttttttttttttttttttgtgagtattttgtgtttataaatagtgggggaaatgggtgttttttgggatagtttagatgttggaagggggaggaagtaaaaaatttttttggaattttatgttttgggatgtgtttttgggttaggttagttgagtaaggtgtagagaggtagaggatggttgtagtagttgtgaattgggtttgttatggtggataatttatgaggagggttatgttggggaaatagtgttattaattatagtttttgaaaaggggtttgggggaaagaattgaggtgagagtttgtaggattttgaattttgggggtaggagggagagagaaggaaagggaagaaaaagaaaataggttttttaattttgtaggttggaaatgggaggtggtttttggggttggaattttgagggagggtgatttgaaggttatttgggtgtttaggaaagggttttgttttttgggtttttgtgtggtgggtagtttgggagggttgtgttttttgattggggtgtttggggtagggtggagggggtaggagaggggttagggaaagttggagtttgttgggatatggttttagttttagatgggtagattgtttttagggtttaaattgtattgttttttttttagaaaggaagagagaaggaaatttgggaggggtgtgtgggttggtaggtagaatttgttgagttttttgtttgggttttttgtttatgatttaagtttgtttttttggtggattttggaagataggagttggtggttaaattgttgatttttttattgtaga

SEQ ID NO: 310 - DNA, 3523 bp, Artificial Sequence
  chemically treated genomic DNA (Homo sapiens)
tttgtaatagaaaagttagtggtttagttattaatttttgttttttaaagtttgttagggggataagtttgggttatgagtagggaatttaggtgaaaagtttaataagttttgtttattagtttgtatattttttttgaatttttttttttttttttttttagaaagaaaataatatgatttggattttgggaataatttgtttatttgaggttggggttgtgttttggtggattttggttttttttggttttttttttgttttttttgttttgttttgggtgttttgattgggaggtatagtttttttaggttgtttattgtatagaaatttaggaagtaaggtttttttttgagtgtttaagtggtttttgggttatttttttttaaagttttagttttgagagttgttttttgtttttagtttgtagggttggggagtttgttttttttttttttttttttttttttttttttttttgtttttaaaatttagaattttgtaggtttttgttttgatttttttttttaagtttttttttgggggttgtaattagtaatgttgtttttttagtgtagttttttttataaattatttgttgtgataagtttgatttatggttgttatagttattttttatttttttgtgttttgtttggttggtttgatttgggagtgtgttttaaggtgtggggttttagaggggttttttgtttttttttttttttaatgtttaaattgttttagagaatgtttattttttttattatttgtgagtgtagggtgtttgtaaagaagaggaggaaggaggaaggtaggggagggagaatggtaaggagagttttgtagggttgggagaaatgagattaagagagattgggagagggtggtagagaagagaggggggattgagagttgtgtttttgtggttgtgtggatttagaaaaaggttggttttattatgatttatgtgtagtttgtgtatttaggggtagatttggggttgggtgggtggtgttgggtttggtttgttttgtgtatttgtttgtttgttgttggtaggggtgttttttttggttttggatgttgtgttaattttttttttgttgttgatgtgggtgttgttggtgttggttgaggtgttgttggagttgtttagggagttttttttgttgtggtggttgttgttgttgggtgagggggttatggtggagtagggtagtggattgggttgaggagagtgtgtggatgtggttggttggttgtatttgggtttggtgggtgttgtgttggtgttggtagtgtagttgtgggtgtgttttttggagttaaagtggttggagtttgagtggttgatgttgagatttatgttattgtagttgtagttgtatttgttggagtgtatgtttgttgagtttttgaattgtttgtttatggaattatgatttttataattatgtaattggtagtttgggttatttggatagtgattgtaaaatgagtttataaaataagagtttatttgttttttgatatgtgtgtttgatttgtggtttgtggttgtttgtgtgtttatagtatttttgtataatttatgatgaattatggaaatgattgggatatgtatttggtttttttttatgtaggtatttaaatatggggtatgattttgaattatgtgtttttgttgtttagttgtaaattttgtttgatgatttttagaggtaaatttgtgtattaataggggagttgggtggaggtgaggggggtggtgtgtgtgttttgggtgtgtgtttgttgttagttgttgttgtttagttggatttgagtgttatttgttggaggtagggtttattgtttagtttttgattgggggttgtaagggttggggttgaattgaggttatagtttattatggtaaaattattgtattttttttgtagttttattaggatgtattaattgttaggttgttagttgttgattgtgtgtttggtgaggatgtagaggattggggggaggtggtgatttgtattttatttataataattttattttttttgttttgtagttttttttatttttgtgttgaggttggggttggtattgattgttttgttagtagttttgaattttgaaaatatagatattatttttggggaagggggaaagttatttagttaattggagaaataaattttgtttgtagtagtagtagttataattatggttttgtttttgtgagtgtatgagggatagtgtttttgttgtttttaaatgataggtgtttattaaagatagtttttgtgtagtgtttttttaaggtgaggttaaattttatatatttttataattgtagttgattttttttttgtgtgaatatggtttttgtgttattagtttgtgatttgatttgtttatgtatttagtttggaaaatttttattatagggtttggttttttgagttagttgggttttaagttggagggttttttttgaatttagtgagtgggtttaggttttttgtagttatagaggttgtttggggtttggggatttgtggggtgggttattggggttttgtttagatttttaggagtaaaatgagggtgataatggaagtattttttggtagtgtttagtatttttgtagttattttttatggttttgaaagatttaagtaaattataaatatagttgagaggtaagtggagtttttttgttggaggtttggtgttgtaggtgtttttggtatgtttggaagttaggattttggtggtttttatggttttgggttttttgttgggttttgaatgttgttgtggtggtgatgtgggtgttattggaggttgggagtgggaatttggagttgggagtttattttgggttgtaatgttttatttgtgtttaggttaatttgttttggttgaggttgttttttttttattgatggttgtatatgtgggattgagagattgggttttgttggggttttttttgttttttgagttttttttttgttttgggaggtggtttgggaggttgtgataaggttgggttttagtttttagattttttttttttattggttagagatgatttgatgatgttttttgggatttattggtgagggatttaggtagagatgtttagatatgaaatggggtttggtttagggtttttttttttttagtagttttgtgttttgaggttggggagtttagagatattagtataggagttttagatgtatttagggtgtattttagaattttggagttggtttgggtatttttgtggagtgggattgggtgtgtgtagtgtgttttgttttattgttggtattggttgtgtgtgaggttttgttttgttttgttttgttttgttttgttttgttttgttttgttttgtaagaaataaatgtatagatgtttgtaaagttttgggtttttttgaagttgtggaagtttttagatgggagtaggtggggagaaaagttggggaataggtgagggtaagg

SEQ ID NO: 311 - DNA, 5244 bp, Artificial Sequence
  chemically treated genomic DNA (Homo sapiens)
tggtgtttgtttttggttgttgttggggaggttggtgtggggtgtgggatatggttgtggatttgtggttggtggttgtgtttgtttttgttgggtgttttgaaatttgtgttatttttgtttgtttattgtaaagattttatttgtggggaaagtggttggagggttttaaagtggggtgggtagggggttggggtgagggatgtggaggagaggtgtttttgttgggtggtaaagtgtttttagtttgtgggtttaggattttgttgggaggtgtgtgtggagtgtgggtgaagtgattgatggtggagtgaggggggtgaggggggttaggggggtgtgagattttgttggtggttttttttttttggttaggtttaggtggtggggggttggtggggtgtgggattttgtgtgtggtttttgatttggtaaaaattatagtgtttttttatattgtttaaattttttaggagatggtttttttagatttttaaattattgtggtggtttttgagattgaatttgtgtttatgtaagtttaatgtattgaggatggggtaattattatttagatattttgggtgggttgtaaaggtgagttatttagatgtattttggtgagtttggttatgtaggtaggatttgagttgtgttttttgttttgatttttttttttttggtggttggagtttttgtaggttttaagtttggtttagatttggtttggtgtagttggttttttgtgtgttttgtatttggtgggggttttggggttttggtgtggtattggggggtgtttgggatttggttgaggttttaagtgttgtgtggttggttttttttgttggggtaggtggtggttgtgtgttttgtttgagtttaggggtttttttagttgtaataattagtaaggattttttgatttagttttaagttatttgtatttgtatttagatggggtgtatttgtagtgtagttttttggtggggtgttgggagtttgtttgtttttgtttgtttggagattttagtttatgagtataggttgtttgggtattttagaaatttgggatggggtttttgaattttttagaatgggtatttagtatggttttggtgttttgtggttttttgttttttatttagttttgtttttgtgtattttttagtttttgtgattgttgtttttttttttggggttttagggtttttagtttgtattttttgttttgtttttggtttgggttgtgggggtgggttgggggtggggtgagggttttgtgggtgtttattggtgtgggtgtgaggttagtgaggtttgtgtgggttttgggttgtgggttggtgtgattataagagttgggtgtgggtgtttgtagtttgtttgttttttggtggagttgtgtgaggtttggttggttttggttttttttttttggttgtttttgttttttggtttatgtttgtttgtgttttgtttattagtgtttttattgggtaaggtggttttgtgttgatgttgtttgttgttttgttgttgatttttgttttgggtgttgtttgtggggttgtgttttgttgggtttgtggattttttgttgttttttttttatttattttaattttttttatttttgttttgtttgaggaggtggttttttttgtaggtagtttggtttgtaggttgttggtgttgttattttttttgtgttttttttttagttttttttttggtgtgtagttttgggttgtttttttttttgtgttgtgttttggagtggttttggtgttgttattgtttgttttttttttgaggtttgggtttgtgatggtagagggttttgttggtttaaattgagttgggtgtttgtggtttgggtgtagtttttattttgttttttagttattgttttttttggttttttgatgtggtgtttttttttttgtttttttgtgttttttgtgttttttttggtgtttggttttggtttttgtttttttttttgtaattttttttttgtttttttttgttttttttagtttttagtttttgatttttttttttttttatgtttgtttttttgtttttgttgaattaaagtggattaattatatgttttttgtttttttttgtgttgtttttttttgttgtgtgtttgtttgttttttgttgtttttttttttttttgttttttttttggttttttttttttatgtttattttgttttttttattatttttgtttttttttatttttgatataatagttgattttattttttgatatttttttttttttgaaaagtataatatttggtttgttttagtttgaagatagtttgttttttttggataattagatgaattttttttttttttttaaaaaaaagttatttttttgttttgttttgttgtatatttggtttttgtgatttggttagagtggtgttggtagaggagtgtttggtaggagggttaatgtttgttgtttggtttgtgatatgtagtagggaggtgggtggtagtgttgttggtttttaggtaagtggtgtgtgtgggttgggttggggttggggttggggtggtgtgggtttgtgttggatgtttggttttttttttgtttgtttttggtttggggtttgtggggtttggtggggtggttgagtttgggggggaggaggaggaggaggaggaggatggatggttgtgggttttgttttttgtgtggagttttgtgtttattttggtggtggagttgggggtggggtgggggtgttgggaagggttgagggaggtgtgaggtgtttgtaggggtgattttttggttggtttgtgggtgtagggggtgttgttttatatgtgtgatttgtgttttgtgggttttggtttttggggtgttgggtaatgaggaggggtgtggagttgtagaagtttattttggtatgttgatgtggtgttagtgagattgtgagaggaagatgggggtgggtggggttaggatggagaggggttgagttggtaggagttatggtagatgttatatttgtgatattttttttatattttttttggttttgtttgtaatatttttaaataggagttttgggagagggggagaggggttgttggtttgaggttaagaagggtagagtttttgatttggagagaggttgtggtttttgtttagtgggtagtgtggaagtttttatataaggaggtgggaaggagattttttttttttttattgttttgtgtagagatgagttgggggtgtaggatgggagtttatggtattttgttatgggatggtttagggtttttggttgggggtgtaggagagaagagattggttgggaggagggagagggtgggagtaaaggtgtgggggagtggttagtagggagaggggtggggggtagggtggagtttgggttgggaggagttggtttatatataaaagttgaggtattgattagtttgtaaattggatattagttttttttgtgaaagagatttttagtttttttttttttttttttttttttttttttttgttttagtgagttttttgttgagttgtaggtaattagggttgtggagtgaggatttttgttgttattttattttagtttgaggtagggtagtagggggtatggtttatgtttgggttttgggttttgtagttgttagtttgttgttttttggatagtattttttttttttttttttttttgtttttgtttttatttggtttttgtttttttatttgttttttttttttttgttttttttttttggttttttttttgtttagtttagggttttttttgggtttttatttgttttgtattgttgtatgttttttgttttgttttttgttggttttttgatttggatttttaagtttagagtggtggggtttgttgtggaagtgtggtgagggttagagtggttagttggtggagtgtgtttttagaatttggaagggggtggtagagggggtggtgagaggattggttagggtttagttaaggagatgattaaggaggtttttagatttttggtgtagttgtttattagtttttagagagggtatgtaaagttgtgtttttgttttattgtttgtttagttgtttatataatttattgtattaaaaatttttttgggtttgtggagtgaaggttggggttgtttgtttggagggttttattttttgtaggggtagggttaatttgttgtggtggtttttggttttttatttttgagtgggttaatttggttttgtggttttgtagtttgtggagggggtgtgttttaagattggtttttttttttagattgtagtttggggaatttggtgttggattttttaggtggtttgagttggtttttttagtttttatggggagagtttggtagtgtaaatagggagatgttttggaggtttttggttttattggtttgatttgaggtttggaaaggaggttttgggtgtgtgtgtgtgtgtttgggggtatttaaggtagattggagttggagaattgggtgattgggaaaataaggtttttagagtatgggtggtgtggttgtgttaattattggagtttttgatttaggtttggtttagttgtagattggaaaggtggaaaagttagggggaggggtggggttggtttagtaggattggtttgttgttttgagggtgatggtttttttggattttttttgtttagttgggggttgtggggaggaagggattggtttttttggatgtatatgttttgtaggggtggggttgtttgttattttggttggtgttggaggtttgagaagtggtgatgtgatgttgggttggttttgtttttatggtgttataggatggaggttaggttgggtgtttagtttgggtttttgtagttgtggatgttgttgagtttttgtaataatgattgtggagatggttattttttgtgtaaaattattagtgttttttgtaaatggaaggaattgggttttttttgtgtgtttttggatgttttattttgtatatggttttgtgtttttattttggtattatgatttgtgtgttatttttgtaataaaaataatgtttataggaaagttgtgtttttaatttttaattgaatttgtaggttggtaaatttggtttgggaggggtatttttggtttggggtttggtttggttgttttgtttatgttattttttttttgtttttaga

SEQ ID NO: 312 - DNA, 5244 bp, Artificial Sequence
  chemically treated genomic DNA (Homo sapiens)
tttgggggtgggagagaagtggtgtgagtggggtagttaggttaagttttaggttagaggtgttttttttaaattaaatttgttaatttataaatttagttgaaaattgaaagtatggtttttttataaatattatttttattataaaagtaatatataggttataatgttgaggtgagggtgtagggttatgtgtagaatgaagtgtttagaagtatatagaaaaggtttagttttttttatttgtaagaagtattagtaattttatatgaggggtgattatttttatggttattattgtaggagtttagtggtatttatagttgtaggggtttaggttggatatttgatttggtttttgttttatgatattatgggggtagggttagtttagtgttatattgttattttttaggtttttagtgttagttaagatggtagatagttttatttttatagagtatgtgtatttaggaggattagtttttttttttttataatttttagttgagtagggggggtttaggaggattattgtttttaaagtagtaggttagttttgttgggttagttttgtttttttttttggtttttttatttttttagtttgtagttgagttaggtttgggttaaggattttaatggttaatataattatgttatttatgttttagaaattttgtttttttagttatttagttttttaattttagtttgttttgggtatttttaaatatatatatatatgtttagagttttttttttaggttttaaattgaattagtaaggttaggggtttttagaatatttttttatttgtgttattaaattttttttgtgggagttggagagattagtttaggttatttgggaagtttgatattaggttttttagattataatttggaaggggaggttagttttaggatatattttttttataggttgtagggttatagggttgggttaatttatttgggggtgggaggttgggagttattatagtaagttggttttgtttttgtagaaggtggaattttttaggtgggtagttttagtttttgttttgtagatttaggggagtttttgatgtaataaattatgtgagtgattgagtaggtagtgggatagaagtataattttgtatgttttttttaaagattagtgggtagttgtgttgaggatttgaaagtttttttggttatttttttgattggattttggttagtttttttattgttttttttgttatttttttttaaattttaagagtatattttgttagttggttattttagtttttgttgtgtttttgtaataagttttattattttgaatttggaggtttgggttaggggattggtagaaagtaggataggaagtatgtagtggtgtggagtaggtgagggtttaggaaaagttttgagttgggtaaggagggggttgaagggaaggaatagaaagggaaggagtaggtgagggagtagagattaggtgggggtaggggtagaggaaaagaggggaggggggtgttgtttgagaggtagtgggttggtggttgtagggtttgaggtttaggtgtgggttgtgttttttgttgttttgttttaggttggagtgggatggtagtgggggtttttattttatagttttggttatttatagtttagtagaaggtttgttggggtaggaggaggaggaggaagaggaggaggaggaagttggaagttttttttataggagaagttaatgtttagtttgtaggttggttagtgttttagtttttatgtgtgagttgattttttttagtttgggttttattttattttttatttttttttttgttgattatttttttgtgtttttgtttttgttttttttttttttttagttagtttttttttttttgtatttttaattgggagttttggattattttgtagtgaagtgttatgggtttttattttgtatttttggtttatttttgtatagggtagtgaagggggggggggttttttttttatttttttgtatggaaatttttatgttgtttattgggtaggggttgtggtttttttttgggttgaaggttttgttttttttagttttagattagtagttttttttttttttttttgggatttttgtttggaaatgttgtggatagagttagagggggtgtgggggagatgttgtgaatgtggtgtttgttatgatttttgttaatttggtttttttttattttggttttgtttatttttgttttttttttgtggttttgttggtattgtgttaatatattagggtgggtttttgtggttttgtgtttttttttgttatttagtattttggaggttagggtttgtaaggtatgaattatatatgtgaggtggtattttttgtatttatagattgattgggaagttgtttttgtagatattttatattttttttggttttttttgatgtttttattttatttttagttttgttgttagggtgagtgtggggttttgtgtagggaatgggatttgtagttgtttgtttttttttttttttttttttttttttttgggtttagttgttttgttgagttttgtaggttttgggttgggagtgggtggaggaagggttgggtgtttggtgtaagtttgtgttgttttagttttggttttggtttggtttgtatatgttgtttatttggaagttggtgatgttgttgtttatttttttgttgtgtgttgtaaattgaatagtgggtgttggtttttttgttggatatttttttgttagtgttgttttggttgagttgtgggggttgaatgtgtgatggggtagagtggggggatggtttttttttggggggggggggagaatttgtttgattgtttagggaggatgggttgtttttgggttggggtgggttagatgttgtattttttgggggggaaaaggtattgggaaatgaggttagttgttgtattaaggatagaggggggtagagatagtgggagagatagagtgaatgtgaaaggggggggttgaagagagggtgagggggagagaggatagtgagaggtgggtaggtgtatagtgggagagaatagtatggagagaaatagaaagtgtgtaattaatttattttggtttggtgaaggtgagagggtgggtgtgagggggggagggagttggaggttaggagttgggggggatgggagggagtgaagggaaggttgtgggagaaagagtgggggttggggttagatgttaagaggggtgtggggagtatagagaagtggagggaagggtgttatgttgaggggttgggggaggtggtgattggggggtggagtggaggttgtatttggattgtgggtgtttagtttggtttgggttgatggagttttttgttgttgtgagtttgggttttgggagggggataggtggtggtggtattggggttgttttgggatgtagtgtggaaaggggagtggtttgaggttgtgtgttggggggagggttggagggggagtgtggggggggtgataatgttggtggtttgtgagttggattgtttgtggggggaattgtttttttgggtgaagtggggatggggggagttgaggtagatgaagaggaggtggtggggaatttgtaggtttggtggagtgtgattttgtggatggtgtttgggatgggagttagtagtgaggtagtgggtggtgttgatgtggggttgttttgtttgatggaggtgttggtgggtagagtgtgggtaggtgtgggttaggaggtgggggtggttggaaggggggggttggggttggttgggttttatgtagttttgttggagagtaggtgaattgtgggtgtttatgtttggtttttatagttgtgttagtttgtggtttagggtttgtgtgggttttgttggttttgtgtttgtgttaatgggtgtttgtggagtttttgttttgtttttggtttgtttttgtaatttgagttaagagtggggtggggggtgtgggttgggggttttggggttttgggggggggggtggtggttgtaggggttggggggtgtgtgggggtgaggttgggtggggggtagggagttgtagagtgttaaggttatgttgaatgtttgttttagagaatttaggggttttattttgggtttttggggtgtttgggtggtttgtgtttgtgagttggggtttttgggtaggtaggggtaggtgggtttttagtgttttattaggaggttgtattgtgggtgtgttttgtttgagtgtagatgtaggtggtttggggttgagttggggggtttttgttggttgttgtggttgagggggtttttgggtttgggtggggtgtgtagttgttatttgttttagtagaaggagttggttatgtggtgtttggagttttagttagattttgagtgttttttggtgttgtgttggagttttggagtttttgttaggtgtgggatgtgtggaaggttggttgtgttgggttgaatttgggttaggtttggagtttatggaggttttggttgttagaggagagaggattagggtgggaaatatagtttaaattttatttgtatggttgagtttattggggtgtgtttaagtagtttgtttttgtggtttatttaaaatatttggataatggttattttgtttttagtgtgttggatttgtatagatgtgagtttggttttgggggttattatgataatttgggggtttggggaaattattttttggagagtttgaatgatgtaagaaagtattgtgatttttattaagttaaaaattatgtataaaattttgtattttgttagttttttgttgtttaagtttagttaaggggaaggggttgttggtggaattttgtgtttttttggttttttttgttttttttgttttgttattaattattttgtttgtgttttgtgtgtgttttttggtggagttttaggtttgtgggttagaggtattttattgtttggtgggagtgttttttttttgtgttttttgttttagttttttgtttgttttattttgggattttttagttgttttttttatgaatgagatttttgtaatgagtaaatgaaagtggtgtggattttggggtgtttagtaggagtgagtgtagttgttagttgtaagtttgtagttgtgttttgtgttttatgttggtttttttggtggtagttggagatgagtgtta

SEQ ID NO: 313 - DNA, 2932 bp, Artificial Sequence
  chemically treated genomic DNA (Homo sapiens)
gttaagaataaaatatattaagataaggaaaatttgtagttaagaatagaaaaaaattatggttttgaagtatgagttatttaaagaaagtggaaatatttttagattatgtagtaaaaaataaagtgattttttttttttaaatttatgtaataaattgataggtaatatgtgaaagttatagaatgtagattagaggatataataaatttattttttttatgtttataagaagtaagaaaagttttgatgtgagttagtattgttttataattttgaattgtgtagattgtatgtatttttttttagtttgaagtaaatagtggataggaaaaaatattaaatgttggtagtaaatatggaaggaaattataattaatgtaatatgttaaaatatgttatgtttattttattaatttgaattaaaatgtaagaatttaaaatgttttggaaaaatatgggtattgatttgatgtttgaagttttaaaatattatatattttgaaatagtatttgtattttgaaatatttgtttttatatattttttaaaatttttttttttttttattttatttattattaaataaaggatgaatagatgtaatttagaaattgttaagtatgttgaagaaagattattgtagaaaaattttttttagtttttttaaaggtgttaggaagtagaaaggtgatatagaattggagaggttggagtttttgtattaattgtattaaatgtgaattttgagaaaattttttttaattatgttttgtagttatatggatatgaagatttatgtgaattttgaaagatgtgtttatataagttgaaatgtttttaatgatttagttgatgtgtgtttttttatttgttttttttagagaggtgtaatggaagttagaatattttttttggaaatttaatttgttttgtagttttttgaggaattagtatttagttaatttgggttgggagtagttatttgtggtgaggttgattggttgggtaggaatagtgttggggtgtgggttgagtatagttgttttgttttttttgttataggaagtttgagtttatttgagtagtggtttttttaagtttaaagaagtagaggttgttgtttgttttttttaggtttttttattaaagttggagtatttttttttaaaattttatgttttggtggttgttttaaggagtgtgaggtaggggtatgtaaagttgggagttattatgggatagtttttaagtgttaggtttttagattttttgaatttggtttttatgggagaagggttttttgaggtgtggatagtgtgaagttttttggtaagtttatggggattaagtggggttagatttagatttaggagtttttggagtagtgtttaaattgtagtggtattggattatgttgtttggagtgtgtatagtttgtgtggtgtggggatttgttttttgagtttgtgggtggtgggtgggaggaagtattgtttgtggtgattggaattgggagggagaattgtattggtggtgggtaaagtttagaatgtgttgttagatttttaattttgtttttgtggagatgttggagattttgtgtataggaaagtttttgtagtgtttattgtggttagagtagttggggtattaatggtgggtgtttttttttattgttttttggttttgatgggggattagaggttagttttatttttagtgtgtttgaggtttatgtatttggttaatgagttgtggtttttttttaggttgggatggattttgaaggggattgtaatggaggagtaaagaagaagaatttttttaaattgaataataaaaggtaattagtttgttttatttttatagtttatatagttgtgagatttgagtaatttatttttagtttttagttttgaaataaatgatatgttgttgtttttaattatttttaagaaatgtaagttagtttttggaattaatatttttgtttagagtagaagtttgttggttgagtggagtatagtatatgtattttttttgttttttttgtttttttttttaatgatatataatattttatatatttatgaaatggggtatatggaagtgttttttatatgtttggaatgtgtaatgattaagtttgggtatttgaaggatatattattttaggtatattttatttttatgtgttgataatattttaagttttttagttattttgaaatatataatatattgttaattgtagttatttttgtttgttattgaatattggaatttatttgttttatttaattgtttttagttatttattaatttttttttattttatttttttattttttttggttttttttttttagttttggtgtgttttttttttagtttttttgttttagataggtggatgtttatatgtgtttttgttttatgaatttttgttttttaagtggtgttggttgtttatatgtgagttatatgttgttggtgatttgttttgtggtttaggtttttgtttttggtaaatggttatgtaaatattgtgtttgtggtttggttgatgagatagaaggttaaaagtatatttaggttgttaattggtaataaatatttgtatataatattggtaatgtaattatatagggaaaataattatttaaagtaaattttgattatggtgttttgtttttatagaatatttaaaattttattaaatagatttattgttagtagtaaattgtaaaatagattagtaagtttaataatattagaaattgtaatgtaaattataagataaattagttaaatatattaatattataagaaattaagttttttagtgtaagagaaaaaatataaatgtggaaattaaatatatttttaaaaataatgttaagtttgaattagaaattttaatatgaatt

SEQ ID NO: 314 - DNA, 2932 bp, Artificial Sequence
  chemically treated genomic DNA (Homo sapiens)
aatttatattgaaatttttaatttaaatttaatattatttttaaaaatgtatttgatttttatatttgtatttttttttttatattgaaaagtttggttttttataatattaatgtgtttagttaatttattttataatttatattatagtttttaatattattaaatttattagtttattttataatttattattaataatgaatttatttagtgaagttttaaatattttataaaggtagagtattatgattaaaatttattttaaataattattttttttatatgattatattattaatattatatatagatatttattgttagttaataatttaaatgtatttttgattttttgttttattagttaggttataaatgtgatgtttatatagttatttattggaagtaagagtttggattatagagtagattattagtagtatatggtttatgtgtgggtgattaatattatttgaaaagtagaagtttataagatagaaatatatatgagtatttgtttgtttggggtaggaaagttgagaaagaggtatattaagattaagggaaagaggttgggaagggtaaaaaggtgaaatgaaaagaggttggtgaatgattaagaatggttggataggataaataagttttaatgtttgatagtagatgagggtgattatagttagtaatatattgtatattttaaagtagttagaagatttaaaatgttattaatatatagaaatgaaatatatttaaggtgatgtattttttaaatatttggatttgattattatatattttgggtatgtaaaaaatgtttttatgtattttattttataaatatgtaaaatattatgtattattaaaagaaagaataaaaaagatagggaaaatgtatatgttgtgttttatttagttaataaatttttgttttaagtagggatattgattttaaaggttagtttgtgttttttaaaaataattaaaaataataatatgttatttattttagagttggaggttagaaataaattatttaaattttgtaattatgtaaattatgaaaatgaaataagttagttattttttattgtttagtttaaaaaagttttttttttttgtttttttattgtggttttttttaagatttattttgatttgaagagaaattgtagtttattagttaaatgtatgagttttaggtgtgttggaggtgagattaatttttagttttttgttgaagttagagagtagtaagagggagtgtttgttgttgatgttttagttgttttggttgtgatgggtattgtaggggtttttttgtgtgtggggtttttagtatttttatgaaggtagagttgggggtttggtagtgtgttttggattttgtttgttgttagtgtgatttttttttttggttttagttgttgtggatgatgtttttttttatttattgtttgtgggtttagagagtaggtttttgtattgtgtgggttgtgtgtgttttgggtaatatggtttagtgttattatggtttgggtgttgttttaggagtttttgagtttagatttaattttatttggtttttatggatttgttagaggattttatattatttatgttttaagaagttttttttttgtgaagattaagtttaggaaatttgaaagtttgatatttgggaattgttttatagtagtttttagttttgtgtgtttttattttgtgttttttggaatggttattaagatgtgaaattttggaagaagatattttgattttagtggaaagatttaaaggaaatgaatagtggtttttgtttttttgagtttggaagagttgttatttgaatgagtttaggttttttgtggtaaagagagtgaagtggttgtgtttagtttatgttttggtgttgtttttgtttagttaattagttttattatagatgattgtttttggtttggattgattgaatgttgattttttgagaaattgtgaaataggttgaatttttaggaggaatgttttggtttttgttgtatttttttagaaagggtaagtagagaaatgtgtattagttgaattattggggatattttaatttatgtagatatgttttttaaagtttatataagtttttatatttatataattataggatgtagttaagggaaatttttttgggatttgtatttaatatagttaatataaaaattttgatttttttaattttgtattatttttttgttttttaatatttttgaaaaggttaggagaaatttttttgtagtggtttttttttagtatgtttgatagtttttgagttatatttgtttattttttatttgatgataaatggaatgaaagaaaaaggaagttttaaaaaatatatagagataggtattttaaggtataaatgttattttaaagtgtgtaatattttaaaattttagatgttagattaatgtttgtgtttttttagggtattttaaatttttatattttaatttaaattagtaaaataaatatagtatgttttagtatattatattagttgtaatttttttttatatttattgttaatatttaatatttttttttgtttattatttattttaaattgaggaaaagtatgtgtaatttgtataatttaaaattgtaaagtaatgttaatttatattagagttttttttattttttatgaatatagaggaaataggtttgttgtattttttagtttatattttatgatttttatatattatttattagtttattgtataagtttagaagaagaaaattattttgttttttattgtatagtttgaggatgtttttattttttttaaataatttatattttaaagttataatttttttttatttttgattataaattttttttattttgatatattttgtttttggt

SEQ ID NO: 315 - DNA, 1157 bp, Artificial Sequence
  chemically treated genomic DNA (Homo sapiens)
ggattttgttttttttgaaggttttagggaagagtgttttttgttttttttgaaggttttagggaagggtttgtttttttaggtttttggtggtttgtaggtgtagttttttaatttttttttttaagtggtttgttgtttataaggatatgagttatattggatgaggggtttattaattgatggtttttgtaaagtttttatttttaaataaggttatattgtgaggtattgggagttaggattttaatatagtttttttggtggatataatttaatttttaataatgtttatataattttaagtagggtttggtattttgtgtgttttttggagagtggttgagttaggttttggtagtgtttaggttattggtgattgtagtttttggatggtattgtttattataggttttggaggttgtttttatggttttttgatagggtttttgttggtttgggggtttttgattaggggagtggttttaggaggggagagatttgtgttttgggtttagtgtagttgttttgagtaggattgggatttttattaagtgggtgttgttttatgatttttgtgtgtttttaggattatttgggtatgtggtaggttgtttgtatgtttgtggattatttttgtgataggaaaaggtatgggttatttggtaaattaaggtatagagttttaggtggaagttgggaaggtgttgtttggtttgtattggttgaagggttatttgggttaggtgtatagggtagtggtgttgttggaggattagggttggtgtgttggtgtttagtgaggatgtgtagattgttttaggtttggtgttgttgtattgggtatgtgttgatttggttgggtgggaatattttgttttgtttgggttttgttttagttttgtttttgtgtgttttggttttgtttttgtgtgtttttttgttttttttaggtttttggttttgttttgttttagattttgttttatgttgttatttttgtgttttttggttttgtttttgtgttttggatatgttgggatagtttgtgtttttagaatgttttgtgttttgatgtttgtaggtttttgtggtgtgtattgtttgtgatttggtgagtgtttgggttgttttgtttttggaagagtgtggagttt

SEQ ID NO: 316 - DNA, 1157 bp, Artificial Sequence
  chemically treated genomic DNA (Homo sapiens)
gagttttgtatttttttgggagtgaggtgatttagatatttattaagttgtaaatggtgtgtattgtgaggatttgtgggtgttgggatgtaaagtgttttaggggtgtgggttgttttagtatatttggggtgtgggggtggggttgaggggtatggggatggtggtgtggggtggggtttagagtggggtggagttgaggatttgagaaaagtaagagagtgtgtgggggtggggttggggtgtgtgggggtggagttggggtggagtttgggtggggtggggtgtttttgtttgattgggttggtgtatgtttagtgtggtggtgttgggtttgaggtagtttgtgtatttttgttggatgttggtatgttggttttggttttttggtagtgttgttgttttgtgtgtttgatttggatggttttttggttggtataagttgggtggtgtttttttagtttttgtttgaggttttgtgttttagtttgttaaatggtttgtatttttttttgttatagggatagtttgtgggtgtgtaagtgatttgttatgtgtttgagtggttttgaaagtgtgtgggggttgtaggatggtgtttgtttagtgagaattttggttttgtttggggtggttatgttgagtttggagtgtgagtttttttttttttggggttgtttttttagttagggatttttagattagtagagattttgttagggggttgtgggggtagtttttagggtttgtggtgggtgatgttgtttaggggttgtagttattgatggtttagatattgttagagtttgatttagttgttttttagagagtatatagggtgttaggttttgtttggggttgtgtggatgttattaggagttgaattgtgtttattagagaagttatgttggagttttaatttttagtattttataatgtgattttatttggagatggggattttatagaagttattaattagtgggttttttatttagtatgatttgtgtttttataggtagtaggttgtttggggaggaggattggagggttgtatttgtaagttattagaagtttaagaggatagatttttttttggagtttttggagggagtagaggatatttttttttggagtttttagagggagtaggattt

SEQ ID NO: 317 - DNA, 8093 bp, Artificial Sequence
  chemically treated genomic DNA (Homo sapiens)
ttatggaaggaaatgagattagttagtgagttgatatagaataaggtagtttaaaataaatttttttaaaaatatgaagaatagatattgaagggaagaggtgtttgtaaagattaagaaagtatatttggagatggtatttttttaaagttaaagttattaagtgtttaagtgttttaaggagggtaagattattaataaggatttagtatagtagagtaatttgagtggtaatatgggatattgggaatataaatttgttaagaaaattagtaggaatgagttataggatagtaattggtaaggatttaataattttttttttaatgtatgtattttaattatatttattgttataataggattagtaataattatatttatttaaaaaaaaaaagattgttatgtagttatagaattatttaatatagaaaatagtaaaatatatttttttttttttttttttttttttttttttttataaataagattagtttatagtaaattttttatagttaagggttaatttaaaatttttggtttatattttttttttatttaatgattatatgatgtaaattaattttattaatattttaagtaaaatatattggaattttataaaatgtataagattttaatatttaaggaattggggttagaaagtagaagtggtttttaggttttttagttttttttttaagtaataaagttttgttgtgaatatttaaagttattgggaaattattggtagatttttttgttttttttttttggttttttattatgttgtttttttagatatgtaagtttattttattaattaaaattttagtttgattatttttgataagtatttaattgatatgtaattttttttttgttttaaatatgtataataggatagagtttttaaatttgatttaattattaatttttgatttataagtgttatggtgagttaatagaatttattaatgtttttattgtattttattagttaaatttagaaggttggaattagttttttttatttagtattttgttagtttgtttagtttgtatttttaattttgtttttaatggtaatttgttttattttttgaaataaaataatttatattttgggagggttaattttttattgtgttaggttgttttatgtattgtaggggtgagtgtttttaggtttaaatgttaatagaagtttttagtaaatatgataattaaaaaagtgtttttatatattttttagtattttttggaatgataggttattgtttttagttgaaagttattggtataattttggtttttaagtttttatgttatttattttaattgtttagatattaattttatttaaatttttagttatagtttggttttttgaatttgttggattagtaattatagattaaggtgttttaatagttaagataggattttggaataagagtttttaaattgtataatatttgagaggatttatgaatataaattgggttttgtttataattagttttatataatgaattttaagattgtttttttatggtgaatagaagtttggaaattattgttttggtataaagtagattattttagtagaaatatagaattattgtaatttgtgaataagattgtttttaaatatttttatttgtgtgttattttatatatagaatgtgtatgatagttttaaattttagaataaatttatttttagtatttaataaaatttgatattgtattattttaaaataaagtgtttattttaggtaggattttttaaaataaagtagtaatatttatgtagataagataaaaaagttaaaatattttatattttttaattttggagtgtaattttttttttttattgtttttgatagggttaaatttgtgtttatagtaaaaaaaaaaaaaaaaagaattattaattggtaattattaagattttatatttattatagttttttaataggtaagttgataaaatagtttttagttattaaaaaaaaaatttaaggaaaatttttaataattagttttatttttaaattgtatgaagttttttatatttgaaatttaaaaatgattttaatgattttttttattagtaatgtgttattattgaggtgggtgatggggagggaagagggaagaaatttgttagtattatttttgaatttagaaatgtttaaaaaaaagttttaaatattttgatggttagataaaatatttttattgttatgtatgggttttttttttggaaatttatgaatttgttatgtgagtttttgtaaattggtttaaaagtatatttaaggagttgataatttaagattatatgaattagaattttaatattttattaaaataagagttgaaatttttggtatttatttttagaatatttaaaaaatagattgtaaatttaatttatattaatattaaatttttttaaaattaattatattataaaagataatgattttgttattaaattaagttttaaaaaaggtggtatttttatgttttagttttatgttgttatttgagatgaaaaaaaaggtaattgttagaattttaattgtgattagtttggatggttggtatttggtatttttttataatttaaattagtaaatttgaaaatttaaattaatttttgtttttagaattaaatttttgttgagttttttaattttgtattataaagttttatggattagatttattttttttttttataaggttattttaattgggttttattttagttgtggtaatttgaaatagggtttggagatgtttatttgttaatggttgatttaaagtgtgttggttttgagttaaatatgaaaaagtttttttatagatttggttattattaaataaggatgttattttataggtaatttttttgataattgggtaggatttagtagataatttagtataaaattgttttaagtttttgattttgtatttattttaaagattagtgtttgtttgaagttttgttagttttatttttattgaaataggtgtatatttaggtttaaagttaaatggatttgaaaaaagttttaagttttttttaatgaatttgaggtttttaaaatgttttttaaattttttttggagatgatagattattatttgatatttattaggattaaatatttttttattttttttattttgttgttttagtttattaataatttttttgagggtaggaaagtttgttagatttttttttttaatatgtttttgaaataaatttagtttaattttgaaagtataaatatggttaaaggtagtagtagtaaagattttattaatttgtaattttttattgagtttttgaaggtgttttataatgtttattaagaagttaaagttataaagttattgtttgtttgagaagtggattgttgttgtttttattgaaattaagaatgtttttatttttttttttagagagaatattagttttaaagtttttttttttttaagttaattgtttagatattgtttattaatttttttattatgttttgatttagattttgttagtaaagtttgaaatttaggttgtttaatgtttttggttttaattaaaattatttatttggatatggtatttatgatttgattaatatttatattataggagtttaatagttttaagtgaagaaattttgaataatgaatgatattttaatagttggggtttatggtttttttttttatgtatgagatgagttttgagtttttattaattatttttaaagtatgggttgtggttagtttaattattttttgtaagttaagttttgttgtttgtagggattttaggattgttgatatgagtgtattaatattgaaatgatgagttaggttgattatggttagaagatttttttgtatttttaatttagggtttatattgtggataaagattaggaggtagtttttataggttataaaagtttggttgtttaaggtaagagaataggttttaaagtttttggtttggttaaaaagttggttgtgtagatttttgttaatgtttaggattttttgttttgtgatatttggagataagttaatgttttgtaggatgtttatatgtttgggtagtattttttttagtaatatttttatgtattggtatataaagttttttttattttagttgtgattttttaaggttaagaggtggtagagtttgaggtttgtatgagtagttttttttttaggagtgaaggaggttatgggtaagttgttttgatgtagatgttttattagggttgtgtgtttgttgtttgttatatattgtttgtagtatttgtgtttagttttgtagtggtgtttgatgttgtgtttgtgggtagttatgatgaggtggtgatagattaggtatagggttttattgttttttggaggttttattattaaataatgttgggtttatttgggttggaaaattagagttttgttgatttttattttgttttttttgggtgttatttatattttgtgggaggttataagagtagggttaatgttagaaaggttgtaaggggagaggaggagtttgagaagtgttaagtattttttttgttttgtgttagattattttagtagaggtatataagtttggttttggtatttttgtttttattggttggatattttgtattttttgagtttttaaaaatgaattaataggaagagtggatagtgatttttaatgtgtaagtgtatatttttttaggtagtgggtagtagttgttttagggagggatgaagagatttagtaatttatagagttgagaaatttgattggtatttaagttgtttaattaatagttgttgttgaagggtggggttggatggtgtaagttatagttgaaggaagaatgtgagtatgaggtattgaggtgattggttgaaggtatttttgttgagtatttagatgtttttttggtttttttggtgttaaaatgttgtttgtggtaggggttatttggtggttggatgagatagtggtgaattgtattgtggtgggggaagttatttagtggttagttaatgttattaaagagatgattgagaattggtatggagggagttgagttgggtttatttaagggttatgatttaatgggttgtgttatttaatggtgtggatatgtttttttgtttgggtagaggtatgtatagtgtatgtttataatggtggaggttgttgggttttttgatgtgttagttaggttttttttttttttgtagattgtgtgtttttttattgtttttttttgagattttttaagggttgtttggagtgtaagtggaggaatatatgtagtgttgttttaatggtattgttaattaagtaaggaagttatttaatttaaaattatgtatgtagaatatgtgaagttaaaagatgtataaaagtttaagatggggagaaaaatttttttttagagggtattgtgttattgtttttttgttttttatttattttagaaattatttgtttatatttaaaggtataatttattttgagttttttttaaaataaattgtttgtagttttaggataggttgatgtattttgggtttgatttttgattattttattgttaaattagtgattttttttagtgtttttttgttttttattttggaggatgtattttgaagatattagattttatgggttatttttggattttgaagtttataattgtgataaaaaatgtgaagggaagagatttgaaatatgtggaaggaaaagtgagtgtagattataaatttttaaaaagataagtttaaaatatatttaaatgttatgttagattattttgttaaaattagttgttagtgatgtttgtatgttaatagaaaaaagaatgttttagtttggagtggtaggtttttagagggatttattgtgaaagtataaattatttagggtaatgggattgagagaatagtgggtagaaaggattattgaaggaaaggaagagaattggaaggtagatgaaagaaggagtaagaatttggggatgtttttttttttttatttgtaatagtagtaatagaagtaatggtagattggtttttgtttttattgtgttagaatgaattgataggataattgggtttattattgtattgtgttagaatattgtaaaataaaattaaatatattagtttggtggtttgtaattaattatttaagtggagatttttattttttttttattttttttttagatggagttttattttgttatttaggttggagtgtagtggtgtgattttagttgattgtaattttttttttataggtttaagggagatttttttgttttagttttttgagtagttaggattataggtatgtgttattatatttggttaattttgtatttttagtagagatgggatttttttatgttggttaggttggtgttaaaatttttgattttaggtgaattgtttgttttagttttttaaagtgttgggattataggtgtgagttattgtgttttgtagttttttgtatttttaatagagatagggttttattatgttagttaggatggttttgattttttgattttaggtgatttgtttgttttggttttttaaagtgttgggattataagtatgagttattgtgtttggtttaagtggagatttttatatggagtttagttatattttttttaatatataagttgagatgattaatataattttaatataggggtttatgagaaatgtttgtaatatttaagtaatttattgtttttttttttttttttttaagatgaagttttattttgttgtttaggtggaagtgtagtggtgtgattttggtttagggtaatttttgttttttggttttaagtgatttttttgttttagttttttgagtagttgggagtataggtgtgtatgattatatttggttaatttttttatttttagtagagatggggtttttttatgttggttgggttggttttgaatttttgattttaggtgatttgtttattttagtttttttaagtgttgggattataggtgtgagtttttgtgtttagtttattattttatttttgaataaagaattgtttgtgtggggaatagataatttttttttatgtagtttttgttagaaaatttgttttttttagtagttggtttgtgtttataggttattttttgaaagtataaaaaatttattgattttttttttttgggtttttttttttttttgagatagagttttgtttttgttgtttaggttggagtgtaatggtgtgattttagtttattgtaatttttattttttgggtttaagtgatttttttgttttagttttttgagtagttgggattataggtatgtgttattatgtttggttaattttgtatttttagtataaatggggtttttttatgttggttaggttggttttaaatttttgattttaggtgatttatttgttttggttttttaaagtgttgggattatgggtgtgagttattgtgtttggttagaaaatttattgattttttaaagatttattaattttttgtattattttttttttttttttttattgtaaatataaaagggaatagtagagaaaattatttagaattttattttttagtgatattatttagtgatattttattagagttatttaggaatttgaggttgaataaagtttaggtaaaagtaaaattagttgagaagagatatttgttaaaagaaatttatttttaattttatttgttgttttttttagaggaatagaaatagtgttgaatgttttattagaaatgatggttgttttgtttgtttttttttttttttttatataatatgtaaatttatatagtgtatgagtttgtaagataaaggaaaaatatgttaatgaggtattattgtttgtatttggagtttgttattattgtttggtttatattaaaatatgtatattagagtagttgtagattgataaattattttttgtttgatttgttagt

SEQ ID NO: 318 - DNA, 8093 bp, Artificial Sequence
  chemically treated genomic DNA (Homo sapiens)
attggtaaattaaatagaaaataatttattagtttgtaattattttaatgtatatattttaatatgagttaagtaatgataataaattttaaatataaataatagtgttttattaatgtgttttttttttgttttataggtttatatattgtatgagtttatatattgtgtgagagagagggaagagatgggtagagtaattattatttttaataggatatttagtattatttttgtttttttaggaaagatagtaagtgaagttaaaaatagattttttttggtagatgtttttttttaattaattttatttttatttgaattttatttagttttaggtttttaagtgattttaataaaatgttattaaataatgttattaaaaaataaaattttgaatgattttttttattatttttttttatatttatgatggaggggaaaaaaaaaagtaatgtagaaagttaataaatttttaggaagttaatgaattttttggttaggtgtaatggtttatatttataattttagtattttgggaggttaaggtgggtggattatttgaggttaggagtttgagattagtttgattaatatggagaaattttatttgtattaaaaatataaaattagttaggtatggtgatgtatgtttgtaattttagttatttaggaggttaaggtaggagaattatttgaatttaggaggtggaggttgtggtgagttgagattgtgttattgtattttaatttgggtaataagggtaaaattttgttttaaaaaaaaaaaaaaatttaaaaaaaagaagttaataaattttttgtgtttttaaagagtagtttataagtatagattaattgttagagaaaataaattttttagtaggggttgtatgagaaagagttatttattttttatatagataattttttatttagaaataagataataggttgggtatgggggtttatatttgtaattttaatatttggggaggttgaggtgggtggattatttgaggttaggagtttaagattagtttggttaatatggagaaattttgtttttattaaaaataaaaaaattagttgggtgtggttatgtatgtttgtatttttagttatttgggaggttgaggtaggaagattgtttgaaattaggaggtagaggttgttttgagttaagattatgttattgtatttttgtttgggtaatagagtaagattttattttaaaaaaaaaagaaagaagataataagttatttaaatattatagatattttttatgagtttttgtattgaagttgtattagttattttaatttatatattaaaaagagtataattggattttatataaaaatttttatttgagttgggtgtggtggtttatgtttgtaattttagtattttgggaggttaaagtgggtagattatttgaggttaggaaattgagattattttggttaatatggtgaaattttgtttttattaaaaatataaaaaattgtagggtgtggtggtttatgtttgtaattttagtattttggaaggttgaggtaggtggtttatttgagattgagagttttgatattagtttgattaatatggagaaattttatttttattaaaaatataaaattagttaggtgtggtggtatatgtttatagttttagttatttgggaggttgaggtaggagaattttttttgaatttgtgaggaggaggttgtagttagttgagattgtgttattgtattttagtttgggtgataaagtgagattttgtttaaaaaaaaaataaaaaaaaaataaaaatttttatttaagtaattaattataagttattaagttagtatgtttagttttgttttatagtattttggtatagtataataataggtttagttgttttgttaatttattttaatatagtagaaataaaagttagtttgttattgtttttgttattattattataagtgaaaaggaaaaaatatttttaggtttttgtttttttttttatttattttttaatttttttttttttttttagtggttttttttatttattgtttttttagttttattgttttgaatagtttatatttttataataaatttttttagaaatttattattttaaattgaagtatttttttttttattaatgtatggatgttattaataattgattttaataaaataatttgatataatgtttaggtgtattttgggtttgtttttttggaagtttatagtttgtatttatttttttttttatatgttttaaattttttttttttatattttttgttatagttataagttttaaaatttaaggatgatttataaaatttggtatttttgaagtgtgttttttgaaataaaggataggaaaatattaagaggggttattaatttaataatagggtaattagaagttaagtttaaagtgtattagtttgttttaaaattataaatgatttgttttgaaagaaatttaaaatgaattgtgtttttggatgtgaatagatgatttttggaatgaatgaaaagtaagaaaatagtaatatagtattttttgaaaaaaggtttttttttttattttaagtttttatatattttttaattttgtatgttttgtatatataattttaaattaagtggtttttttatttagttaatggtattattaagataatattatgtatatttttttatttatattttaaataatttttaaaaggttttgggggagagtggtaaagaaatatatggtttgtggaaaaggagaaggtttgattggtatgttagggaatttggtggtttttgttgttgtgggtatgtgttgtatatgtttttgtttgggtaaagaggtgtgtttgtgttattgagtgatgtggtttgttaagttgtagtttttaagtgagtttggtttgattttttttgtattagtttttaattatttttttgatagtattagttggttgttggataattttttttgttgtgatgtggtttattattgttttgtttagttgttgaataatttttgttatgaatgatattttggtgttagaagagttaaggaaatgtttagatgtttaatggaagtgtttttagttaattattttagtgttttgtgtttatgttttttttttagttgtagtttatgttatttagttttattttttagtggtagttattgattggatagtttgaatgttagttaaattttttaattttgtgggttgttgggtttttttgtttttttttgaagtggttattgtttgttatttagaaggatatgtgtttgtgtgttagagattgttgtttgttttttttattggtttgtttttaggagtttggggaatatgaaatatttagttaataggagtagagatgttggaattgggtttgtgtgtttttgttgaggtgatttggtgtagagtggaggaggtgtttggtgttttttaggttttttttttttttttgtggtttttttaatgttggttttgtttttgtggttttttgtagaatgtggatgatgtttaaaagaagtaagatggaagttgatgaggttttagttttttggtttgagtggatttagtgttatttggtggtggagtttttggagggtgatggggttttgtgtttggtttgttgttgttttattgtagttatttgtgaatgtgatgttaggtgttattatgaggttgagtatgaatattatgagtggtatgtggtggatggtgagtgtgtggttttggtggagtgtttgtgttagggtgatttgtttgtggttttttttatttttgaagagagagttgtttgtgtaggttttgggttttgttgttttttggttttgaagggttgtggttggggtgagggggattttgtatattagtgtatggaggtgttgttgagagaggtattgtttgagtatgtaagtgttttgtaaggtgttgatttatttttagatattataaggtagaggattttgagtattgataggaatttatgtaattagttttttaattgagttagggattttaaagtttatttttttgttttggatgattaggtttttgtggtttatgagaattattttttggtttttatttgtggtgtaggttttgagttggaggtgtaagaagattttttgattataattaatttgatttattattttagtgttggtgtgtttatgttggtaattttagagtttttgtagatagtagggtttagtttgtagagaatggttggattgattatgatttatattttgaggatgattggtgagaatttaggatttgttttatatatgagagaaaaggttgtaagttttaattgttggaatgttatttattatttaggatttttttatttggaattgttgagtttttatgatgtagatgttaattagattataaatattatatttgaatggatagttttgattaagattagaggtgttaggtgatttgaattttagattttattaatggaatttgaattagagtatggtgaaagggttaatggatgatgtttgaataattggtttaggagagggaaaattttaaaattaatattttttttaagaaaagaaatggaagtgtttttggttttagtaggggtaataatagtttattttttagataaataatggttttgtgattttggttttttggtggatattatggaatatttttgagaatttagtgaagaattatgagttagtaaagtttttgttgttgttgtttttgattatatttgtatttttgaagttaagttgaatttattttaaagatatattgaggaaaaaaatttaatagatttttttgtttttagagaagttgttgatgagttaaaatagtaaaataaggaagatgaaaaaatatttgattttgataggtattaaatggtgatttgttgtttttaaaaagaatttgagagatattttaaggattttaggtttattaaaaaggatttagaattttttttaaatttatttaattttaaatttgaatatgtatttattttagtgagggtggagttaataaaattttaggtaaatattaatttttggaatgaatatagaattaaagatttggggtagttttatgttggattgtttgttgaattttatttaattattaaaggggttgtttgtaaggtggtatttttgtttgatagtaattaaatttgtgaaaaggtttttttatatttgatttgaaattaatatattttgagttagttattaatagatgagtatttttaagttttgttttgggttgttataattgaaatggagtttggttgggatgattttgtgagagaaagaaatgaatttaatttataaggttttgtagtataagattgaaaaatttaataagaatttaattttaaaagtaaaaattggtttgagtttttaagtttattaatttggattgtgagaaagtattaagtattagttgtttaaattgattataattaaaattttgatagttgtttttttttttattttaaatggtagtatgggattgaaatatgagaatgttattttttttaaaatttagtttagtgataaagttattgttttttatgatatagttaattttaaagagatttagtattaatgtgagttgaatttgtagtttgttttttaggtgttttgaagataaatgttaaaaattttagtttttattttaatggagtgttaaaattttgatttatatagttttaaattattaattttttaaatgtgtttttgaattaatttgtagaagtttatatagtaagtttataagtttttaaaaaggaagtttatatataatagtggaggtgttttgtttaattattaaaatgtttgagatttttttttaaatatttttgagtttgaaggtaatattgatagatttttttttttttttttttttattatttattttagtgataatatattattgatagaggaagttattagaattatttttaagttttagatataggagattttatgtaatttggagataagattaattattgggggttttttttggattttttttttaataattgggggttattttattagtttgtttattaaaggattatggtaagtatagaattttaatggttgttagttagtaattttttttttttttttttttattgtagatataagtttggttttattaaaaatgatgaggaaaaaagattgtattttaggattaggaggtgtgagatattttagtttttttgttttatttgtgtgggtattgttgttttattttaaaaaattttgtttaaagtaaatattttgttttaaaatgatatagtattagattttgttagatgttagaaatggatttattttaaaatttggaattgttgtatatattttatatgtaagatagtatataagtagaaatatttaaaagtagttttatttatagattgtagtaattttgtatttttattaagataatttgttttgtgttaaaatagtaatttttaaatttttgtttattatgaaaaggtaattttaaagtttattatgtaaaattaattataaataggatttaatttatatttatagatttttttaagtattatataatttaaaaatttttgttttaaagttttgttttaattattgaaatattttaatttgtggttattaatttagtaaatttaaggaattaggttatgattaagaatttaggtggaattgatgtttgggtaattaaaataaatggtataagagtttaaaaattaaagttgtgttagtggtttttaattagaggtagtaatttgttattttagaggatgttgagaaatgtgtaggggtatttttttggttgttatatttattaggggtttttgttggtatttaagtttaaagatatttatttttgtagtgtatgggatagtttggtataatgaagaattagtttttttaaaatgtagattattttattttaagggatagggtagattattattagaagtaaaattaaaagtataagttgggtaaattgatagaatattagataggagagattaattttaattttttaaatttggttagtaaagtgtaataaaggtattgataagttttgttagtttattatagtatttgtaaattaggaattaataattgaattagatttaagggttttgttttgttatatatatttaaggtagaaaaaaagttatatgttgattaggtatttattaagaatggttaagttgagattttggttaatagagtaagtttatatatttagagaaataatatagtggaaaattgaaaaaaaaaaatagaaaaatttattggtaattttttaatagttttgaatatttatagtagagttttattatttgagagaaagattggaagatttgaaagttatttttgttttttaattttagttttttaaatattgaaattttgtatattttgtgaaattttagtatgttttgtttaaggtgttaataaaattagtttgtattatgtagttattgagtgagggggagatataagttaaggattttaaattgatttttagttatagagaatttgttataagttagttttgtttgtaaaaaaaaaaaaaaaaaaagaaaaagaaaaaagtgtattttattgttttttgtattaagtaattttgtaattgtatggtagtttttttttttttaaataaatatagttgttattggttttgttgtagtagtgaatatagttaaaatatgtatattaaaaaaaaaattattaggtttttattagttattgttttatagtttatttttattagtttttttgatagatttgtatttttagtgttttgtattgttatttaaattgttttattatgttaagtttttgttaatagttttattttttttgaaatatttgaatatttgatgattttagttttgaggagatattatttttaggtgtgtttttttagtttttgtaggtattttttttttttaatatttgttttttgtatttttaaaaaaatttgttttagattgttttgttttgtgttagtttgttagttgattttatttttttttatgg

SEQ ID NO: 319 - DNA, 7040 bp, Artificial Sequence
  chemically treated genomic DNA (Homo sapiens)
atatagtttggtttgagggaagatgttagtatgtgattataaattggataaaattatttaagatagttgtattttaattagattaaattttaaaattttaaatatttataagtattttatgtttttaaaaatatgagaaatttgtaagatattattaaatttaaaggtttttaaaattagtttgaaatatatttgtatgttttaaaattttttgtgaagtttagttgtatttagataagtaaaattttatttatgtatttttagagttaaaatataaaatttaagtgattagggtaaagtggaagtaattaattttaatttttttgtatggaaatagatagtgtgtgttggttatatttagggatgtgttttatgtaatttataaattaagatttgttttgattatattatatggattatataaaaattaaagtagttgtatatgtattttattgatatagaaataagtttatgttatattgttaagtataaaatttaaattttagaatgttaatagtataattttattgaagtaaaaaaaaattgatatgttttttaagtttgagtttataatttttgtatgggaatttttagtaaagtgtatatatttatttatagtttaattttttagttttaaaaaaggtaaaagtgaaattttgataatgaaatttatggttgtaattagtaatattatatttgtatggttgtaatatttgtgttttttgtattgtaatttttggaatttattgtaattttttgaatttgttgttatttgagattttttaatttggtggttttttgttaggatttgggtggttgttaagagtgtgtaggtgtaagtgtggttgttgttggtggggttttatgtgttgttgagattgttgttgagtttttgggtttttttaagattgttttttaaaagatgatgtgatgattttaaagagaaaggaaaatttgttgtgtatgtagaagggtaggttgggtgtattttgagtgttttttggggattgatggttttgtttatgtgtttttgggtattagtgtgtttaaagtttgtgtattaggaaatgtataaaagtattagtgggtgagtttgagggtgagtttatgggtagttaggaggtggtgagggtggtttgttttttagagattggggaattaagaaaggtagagttatttttttggttttagtgtagtaagtgtaggaggtagggagggtgtagtgttttgttgtttatggtatttgtggaatttggtgtgtgttttgggagttggggtggtttaggtttagtgtgtttagaaagttaattatgttggttaggaggatgtttttttattatttgtgatttttaggttttgattaaagttaaattaaaaggagttatttgttttggtatttgttgttatttttgtgataaatatggtgtttgatatgaaagtattttaatagttatgttgttaattaaagaataaaatatgtaaagtttgtgtgttaagaatatgagagtattttgttttttaggaggtgtagtttattttgttttttttgttttatatataattttaaggagaattttttgttattaatatattttgttttttgtttttgggggatgatataggtatattgtatttgattagattagtgttaattttttatttatgtttttattatatgttgtattattaatatagtaggattttatatttttaattgtaaaatttaagagtagaaaaatatttaaattgtatgttagtttaatatgaaaatgagttattttagttttgataggatatttttaaattaatattatttaataaatatgttttttatttgtataagtttatatatatggttttttaaatgagttttataaataataattagtattgaggttttgatttaagtatttgaaattttgttattttttataataattttgagatgggtatattttttttattttgtagataaggaaataggtattgggatggtaagaaatttaggttatttggtttttaatagttttttattattatgttaaagttttatttatttttgagatttaaaatattatatagtgtatatatatttggtaattaaattaggattaaatattaaagttaagggttaagtatagtgttttgtaattttagtattttgggaagttgaggtgggtagattgtttgattttaggagtttaagattagtttggaaaatatggtgaaattttattttaataaaaaaatataaaaatagttgggtgtggtggtgtgtgtttgtggttttagttatttgggaggttgaggtgggaggattgtttgagttaaggaggtagaggttgtagtgaattaagattatattattgtattttagtttgggtgatatagtgagatgttgttttaaaaagaaaaaagtaaaattaaagtaagaatataataagaaatatgtttggtattgtgttatggggagaaaaaattaatagggagataaattttgtttttagggtaagtgtaatttgttgagtaaaagaaatattttaagatattttaaaaaagaaaataaaggttgttgtaaattggatatttaattaaatatttttgggtagattggtagatgatagatttaatgaatttggggtttataaatatatagaatgttatatttttattaatattttatgttttgggtaaagagtaaaattaattttgaaaatgaattgtgtatgtaattattttaaaaataaagattatataataagttatattattttgtattatgtgtaatatttagggggttaaggtatttttattttgttaatatttatagtatttttattatataattattttagagttttgaattataattttaattaggtgatagttattgagtaaattttgtaatgtaaatttattatagaatataattgtattattttttttttatttattggtatttttttatatttggggtttgatataattgtatataataatttttttattaaaatattttatagagttggttaggtatggtggtttatgtttgtaattttagtattttgggaggttgaggtaggtggattatttggggttaggagtttgagattagtttggttaatatggtgaaattttatttttattaaaaatataaaagttagttgggtatggtggtatgtgtttgtaattttagttatttgggaggttgaggtgggagaattgtttgaatttaggtggtggaggttgtagtgagtggagattgtgttattgtattttagtttgggtaataagagtgaaattttgttttaaaaaaaaaaaaaagattgaggtttaagtaggttaaatattatatatatattagattatatattaagttatataggttgtatagaatagaaattttattttagggttttatagattttaaattgtttttgtaaatggtttatgtttattaatttatttttttaaagttaatatattttaaaaatagaattgttattattaaaatgtggttatatataatttaatatataagtgttttagaagaagggaattttattatttgattttttaaaatatagattttaatatttttgtgtgtgtgtgtttttttatgaatatggtaatattattggttttttttttaaagatatggtatgaaattaattttttgtttagagttaggattttgttttattatttagtttggtgtgtagtggtatgattatagtttattatagttttaaattttttagtttaagtttttttttgttttagtttttaaagtagttaggattataggagtgtattattatatttagttaattttattattattttttgtagaggtaggttttaaatttttggttttaagtggtttttttattttagttttttaaagtattggtattataggtataatttattgtatttggtagaaaattaatttttattataaaaattagaaagaaagattttattgtttgatggttaatattttgaattttattttaatttttggttttttatattatatgtaggtattagtgattttgtgttatttttatttttttagatttttttttttttataatttttttatatgtgttattatttgaagttttgattatagttttgaattatttttatttttttgttttttttaattttggtttaaaattttggtaatttatttgttatgaagtttagaattttttttgtaagtgagttgattggttgggttaaattgttttggaagggaaggattgttaggaagttagtatgttgttaagatgttttgttaatttgttgtgtaagttgtatagagtgttaggggatttttttttttattgatgaatttaggtgtgtgttatgatttgtattagtgattttatttggattgattaaggttgtaattttttatttatatgaatgttgtatttagtttttttttgtaattggttaaataaatgtttgttgtttgtattttaatttttagttaatatttgttggaagtgatttaatgtagttggagaatgatattaataattattatagtttgtaaagtgtgaaataattttattgtgttttgtggtttttttagtttgaggattgataatgtgtagtggatgagatttgaaaaaaatgtattttattataatttaagaaataatgtaaaagaggggtgagttttgaggtagttttatgttgtttgtttggtatgagtttgtttttataagaatttattttaagtgtggaagggaaatgtttttatttgaaagggatagttgtgttttattttggtttttttttttatttgataaaaatttttgttgagtgatagtatagatgtagtttatttggaataagtgaaggaaaaggagaaaagggatgaggtggagtgaaggagtagttagttatgtttttaaagttttgtggttttttttagtttttttatttaatttagtggttttggtgtttttttgtaaagtgagatgtttttgtttttggttttatgtttttatttttggagtgagttttttttattggtggatgtgtggttttgtagtagttttttagagttatttgtgaagttgtttttgggggttattttttttgggttttgtggttgttgtgttggttggtttggtgttttattgattgggagtaggtgtgtttgttgtagaggttgggagttggagggtttggtttggtgtataaggtgatttattgtggtgtttttgtggttataaagtaagtgaataagtgtattaagaattgattagtattttggtggagtttttgggttgagtttaatgtagtaaggttgtgttatgataatattgtgtgtgtggtggttgttagtatgtgtatgtttgtagggtttaatagtttagggattattattatggagtttggtggtaatgttattttatattaagttatttatggtgttgttggttattttgagggggatgtaggggagttttattgttgtattggaggatagttaagtttgggaaagtgttttaagtatttattagatgttgtgaatggtttgttttttttttatttgtaaagtattgtgtatttggatttgaagtttgtgaatattttgattagtgagtaggatgtttgtaaaattagtgattttggttgttttgagaagttggaagatttgttgtgtttttagatatttttttattttttaggaggtatatatatttattgtgttttggagtttttgaaaggagagggtgtgatgtttaaagttgatatttatttttttgttattattttttggtaaatgattattaagtaggtgttgtatttgggggagtggtagtatatattgtatgtggtggtggtttatgatttgtgtttgtttttttttgttgttgtttttgaggatttgttttttgggtagtgttttggggatgttatttagtgttgttggagatttagtgtggtgtagaggttgagtgtgtggttgtttttggtggattttatttttttgaaagttgaatttggttgattgaaaatttggttaagataagtttttgtttgattttatttgtttttaaaggaagtggagatgttgaagaaaatatatttgtaggatggagttttagaaaataaagttattaaaaatttttttagtttttagtgttttttttaggatatattagtaaagttataagtttagtatttgttgttttagtattgttagtaattaattttatttatatagttatgtgttttgttttttattgttagtattttatttatttaaatttgttattgataaaagtttgtttaaaatagaattttattgtagaaatgttaaaattttttataaatttatatatattttatatttattatataaattttaattattaatggtgtagttgtttttatattaaattagtaaaaatttttaaaaaaataagtaatgtttttttattattttttttagtaaaattttttgtttgtaatgatttttatttataaaagttatatattgaggtatatttatatttaaaggaattatattataaatgatttattgtaatatttttaatttgtgtattgtaatgagtagaaatattttgttaaaatatttttaaattgggttatttttatttggtattgggatttagaagtagaagataaagattatatgatgtgagaggaaaatgtaggagtagaaggtaaagattatatgatgttaggaattatgaaatttaatatttggatggaagagaatagataaatagaattagattgtttattttagatattaaaataatggatgttggtatataggatttaaaggagaaggtgattggattttgttattgggatagttttgatttttttttagtaatagtagtttttgtgtatggtggaaagtaaggttgatgtaatggttggtagagggaatggtaaggttttgaagtagaggttgtgtatgtattgttaaggagggagaggtaggaagtttaaaagggggttagagatatagaaatgtt

SEQ ID NO: 320 - DNA, 7040 bp, Artificial Sequence
  chemically treated genomic DNA (Homo sapiens)
aatatttttgtgtttttgatttttttttaagttttttgtttttttttttttaatagtgtatgtatagtttttgttttagggttttgttattttttttgttagttattgtattagttttgttttttattatgtatagaaattgttattgttaaaagaaagttaaagttgttttaatgataaaatttaattatttttttttttaaattttatgtattaatatttattgttttgatgtttagagtgggtaatttagttttatttgtttgtttttttttatttaaatgttaaattttatgatttttgatattatataatttttattttttatttttatattttttttttatattatataatttttattttttatttttgagttttaatattaggtaaaaatgatttagtttagaagtgttttagtaaaatgtttttatttattgtaatgtataagttaaagatattataataagttatttatgatataatttttttgaatgtaaatgtattttagtgtatgatttttatgagtgaaggttattataaataagaagttttattggggggagtagtaggaaagtattatttatttttttaaaagtttttattgatttggtgtgggagtaattatattattaatagttggaatttatgtggtaggtatgggatatatatggatttatagaaaattttgatatttttgtagtggagttttattttggataaatttttattaataataaatttaaataaatgaaatattagtaatggaaagtaaagtatatgattatatgaataagattagttattaatagtattgagataataggtattagatttgtagttttgttaatgtgttttagaaaaagtattggagattaaaggagtttttagtaattttattttttaaaattttattttataaatatgttttttttgatatttttattttttttaaaaataaatagaattagataaaaatttattttgattaggtttttagttagttgagtttagtttttaaagaggtgagatttattaaaagtagttgtgtgtttggtttttgtgttgtgttgggtttttagtagtgttggatgatgtttttaaggtgttgtttggggagtgagtttttgaaaatggtagtggagagggatgggtgtaggttgtaggttattattgtgtatagtatgtgttgttgtttttttgaatatggtgtttgtttggtagttatttgttagagagtgatggtaaaggaataaatgttggttttaggtgttatgttttttttttttaggagttttggggtgtggtgggtgtatgtgttttttagagggtaagagggtgtttggaagtatagtagattttttaattttttagagtaattgaagttattaattttatagatattttgtttattgattaagatgtttgtgggttttaggtttaagtgtataatgttttgtgagtggaggaagagtaggttgtttataatatttagtgagtatttgagatatttttttaaatttaattgttttttagtgtggtagtgaggtttttttgtgttttttttagggtggttggtggtgttatagatgatttggtgtaaagtgatgttgttattgaattttatgatgatggtttttaggttattggattttgtgggtgtgtgtgtgttggtagttattatgtgtatgatgttattgtggtgtagttttgttatgttgagtttagtttagaaattttgttgagatgttagttggtttttggtgtatttgtttatttgttttatggttataggaatattgtggtaagttgttttgtatattgagttaaattttttagtttttagtttttgtagtaagtatatttgtttttagttaatggagtattaggttagttggtgtggtagttgtggggtttgaggaagatggtttttagaagtagttttgtaggtagttttgagggattgttgtagggttgtgtgtttattgatggggaaaatttgttttggaggtaggggtgtagggttaggggtgagggtattttattttgtagggggatattagggttgttggattgaatgaagagattaggggaaattgtgggattttggaaatatgattgattatttttttgttttattttatttttttttttttttttttttatttgttttaaatgagttatatttgtgttgttatttagtaagagtttttattagatggagggagaaattggaatgaagtatagttattttttttagatgaaagtattttttttttatatttgaagtgaatttttataaaaataagtttatgttagataaatagtatggagttgttttagaatttattttttttttatattattttttaaattataataaaatatgttttttttaagttttatttgttgtatattattagtttttagattaaagagattataaagtataatgaaattgttttatattttgtaggttgtaatgattgttagtgttattttttagttgtattaaattatttttagtaggtattggttaagagttaaaatgtaaatagtagatatttgtttaattaattatagggaaaaattaggtgtaatatttatatggataaaaaattgtaattttaattaatttaaatagaattattgatataggttataatatatatttaaatttattagtggaaaggagaattttttgatattttatgtagtttatatagtaaattagtaagatattttagtaatatattgattttttaataattttttttttttaaggtgatttggtttaattggttagtttatttgtaagagagattttagattttgtagtaaatgagttattgaagttttgaattagagttgggggagataaaagaatagaaatgatttagagttgtgattagggttttaaataataatatatatgggagaattgtagaagaggaaaaatttgaagaaataaaaatggtataaaattattggtatttatatataatgtagaaaattagaagttggaatgaaatttagggtattggttattagataataagatttttttttttgatttttataatgaaaattaattttttattaagtgtagtgagttatgtttataatattagtgttttgggaggttaaggtggaagggttatttgaggttaagaatttgagatttgtttttataaaaaataataataaagttagttgagtgtggtggtgtatttttatagttttagttattttggaggttggggtgggaggagatttgaattgaggagtttgaggttatagtgagttatgattgtgttattgtatattaggttggatgatggagtaagattttgattttaagtaaaaaattaattttatattatatttttggaaaaaggattaataatattattatatttatgagaaaatatatatatataaaagtgttaggatttatattttaaaaaattaaatggtaaagttttttttttttaaagtatttatgtgttaggttatgtgtaattatattttaatgatagtagttttgtttttgaagtatattgattttgagaaggtaaattaataaatatgaattatttatagaaataatttgaggtttgtgaagttttggaataggatttttattttatataatttgtgtggtttagtatgtgatttagtgtgtgtataatatttaatttgtttgagttttaattttttttttttttttgagatagagttttgtttttgttgtttaggttggagtgtaatggtatgatttttgtttattgtaatttttgttatttgggtttaagtgatttttttgttttagttttttgagtagttgggattataggtgtatgttattatgtttagttaatttttgtatttttagtagagatggggttttattatgttggttaggttggttttaaatttttgattttaggtgatttatttgttttagttttttaaagtgttaggattataggtgtgagttattatgtttggttaattttatggaatattttagtagaaagattgttgtgtgtaattgtgttaaattttaaatataaaaggatgttaatgaatagagaaaaagtaatataattatattttataataaatttatattgtaaaatttatttagtaattgttatttagttaggattataatttagggttttgaaatggttatataataggagtgttgtgaatattagtagaatgagagtgttttaattttttagatattatatataatgtaagataatgtgatttattatataatttttatttttaagataattgtatatataatttatttttaaagttggttttattttttatttaaaatataaggtattagtgaaaatgtggtattttgtgtatttataaattttaagtttattagatttattatttgttaatttgtttaagaatatttaattgaatatttaatttataatagtttttgtttttttttttaaggtattttaaaatattttttttatttagtaaattgtatttattttgaaagtaggatttatttttttattgattttttttttttgtaatatagtgttaaatatattttttattatgtttttattttaattttgtttttttttttttgagatagtgttttattatgttatttaggttggagtgtagtggtgtgattttggtttattgtaatttttgtttttttggtttaagtgatttttttattttagttttttaagtagttgggattataggtatatattattatatttaattatttttgtatttttttgttgagatggggttttattatgttttttaggttggttttgaatttttgaggttaagtgatttgtttgttttagttttttaaaatgttaggattatagggtattgtgtttggtttttaattttaatgtttaattttgatttggttattaaatatgtgtgtattatgtaatattttggattttaaaaatgggtaaagttttagtatggtggtaaaaggttattaggggttagatggtttgggttttttattattttagtgtttgtttttttatttgtaaaatgaggaaaatatgtttattttaggattgttgtgaagagtaatagagttttaaatatttagattagggttttaatgttaattattatttataaaatttatttaaaaaattatgtgtatgggtttatatgaataagaaatatatttgttaggtagtattggtttaaaagtattttattagggttgaaataatttgtttttatgttaaattaatatataatttgagtatttttttgtttttgaattttgtggttaaaggtataaaattttgttgtattaatggtatagtatgtagtaaaaatgtgggtggaaggttaatattaatttgattaaatgtaatatgtttatgttattttttaaaggtaaagagtaaaatgtgttgataataaggaattttttttggaattatatatgaaataaaggagataagataaattgtattttttgaggagtgaaatgtttttgtgtttttagtgtataggttttatgtgttttgttttttgattggtagtatgattattaagatatttttgtattaaatattatatttattataagagtaataatagatattggaatggatagttttttttaatttgattttaattagagtttgaggattgtggatagtgggagaatgtttttttgattaatgtggttggttttttgggtatgttgggtttgagttgttttagtttttggggtgtgtattgggttttatgggtattgtggatggtggggtgttgtgttttttttgttttttgtatttgttgtgttggggttgaggaggtggttttgttttttttgattttttagtttttggaagataagttgtttttgttgttttttggttatttgtgggtttgtttttgggtttgtttgttggtgtttttgtgtgttttttagtgtatgggttttgggtgtgttggtgtttggaagtatgtgggtgaggttgttggtttttgaaagatgtttagagtgtgtttagtttgtttttttgtgtatgtaataaatttttttttttttttagagttattatgttgttttttggaaggtagttttaaaaaggtttagaagtttaatagtagttttaatagtatataaaattttattgatggtggttgtgtttgtgtttgtgtatttttgatggttgtttgagttttggtaggggattgttaggttaagagattttgggtgatagtggatttgagaggttatagtggattttagaggttatagtgtgaagagtgtgagtattgtaattgtgtaagtgtggtattgttggttataattgtggattttattgttgaaattttatttttgttttttttaagattaaaaagttaagttgtagatgaatatatatgttttattaaaaatttttatataaagattatagatttaaatttgaaaaatatattaatttttttttattttagtgggattatattattgatattttaaaatttgaattttatatttagtaatataatatagatttgtttttatgttagtaaagtatatatatagttattttaatttttatatggtttatataatatggttggggtagattttagtttgtggattgtatggagtatgtttttggatgtgattagtgtatattatttgtttttatgtggggaggttggggttggttgtttttattttgttttgattgtttgggttttgtattttgattttggagatatgtaaataaaattttatttgtttaaatatagttaaattttataaaaggttttaagatatataaatgtgttttaaattggttttggaaatttttgaatttaatgatattttgtaagttttttatgtttttaagaatataaaatgtttatagatatttgaaattttgaaatttgatttgattaaaatgtggttgttttgaatgattttgtttaatttatgattatatattggtatttttttttaagttagattatgt

SEQ ID NO: 321 - DNA, 1303 bp, Artificial Sequence
  chemically treated genomic DNA (Homo sapiens)
tggaagggaaatgtttttatttgaaagggatagttgtgttttattttggtttttttttttatttgataaaaatttttgttgagtgatagtatagatgtagtttatttggaataagtgaaggaaaaggagaaaagggatgaggtggagtgaaggagtagttagttatgtttttaaagttttgtggttttttttagtttttttatttattttagtggttttggtgtttttttgtaaagtgtgatgtttttgtttttggttttatgtttttatttttggagtgagttttttttattggtggatgtgtggttttgtagtagttttttagagttatttgtgaagttgtttttgggggttatttttttttgggttttgtggttgttgtgttggttggtttggtgttttattgattgggagtaggtgtgtttgttgtagaggttgggagttggagggtttggtttggtgtataaggtgatttattgtggtgtttttgtggttataaagtaagtgaataagtgtattaagaattgattagtattttggtggagtttttgggttgagtttaatgtagtaaggttgtgttatgataatattgtgtgtgtggtggttgttagtatgtgtatgtttgtagggtttaatagtttagggattattattatggagtttggtggtaatgttattttatattaagttatttatggtgttgttggttattttgagggggatgtaggggagttttattgttgtattggaggatagttaagtttgggaaagtgttttaagtatttattagatgttgtgaatggtttgttttttttttatttgtaaagtattgtgtatttggatttgaagtttgtgaatattttgattagtgagtaggatgtttgtaaaattagtgattttggttgttttgagaagttggaagatttgttgtgtttttagatatttttttattttttaggaggtatatatatttattgtgttttggagtttttgaaaggagagggtgtgatgtttaaagttgatatttatttttttgttattattttttggtaaatgattattaagtaggtgttgtatttgggggagtggtagtatatattgtatgtggtggtggtttatgatttgtgtttgtttttttttgttgttgtttttgaggatttgttttttgggtagtgttttggggatgttatttagtgttgttggagatttagtgtggtgtagaggttgagtgtgtggttgtttttggtggattttatttttttgaaagttgaatttggttgattgaaaatttggttaagataag

SEQ ID NO: 322 - DNA, 1303 bp, Artificial Sequence
  chemically treated genomic DNA (Homo sapiens)
tttattttgattaagtttttagttagttgagtttagtttttaaagaggtgagatttattaaaagtagttgtgtgtttggtttttgtgttgtgttgggtttttagtagtgttggatgatgtttttaaggtgttgtttggggagtgagtttttgaagatggtagtggagagggatgggtgtaggttgtaggttattattgtgtatagtatgtgttgttgtttttttgaatatggtgtttgtttggtagttatttgttagagagtgatggtaaaggaataaatgttggttttaggtgttatgttttttttttttaggagttttggggtgtggtgggtgtatgtgttttttagagggtaagagggtgtttggaagtatagtagattttttaattttttagagtaattgaagttattaattttatagatattttgtttattgattaagatgtttgtgggttttaggtttaagtgtataatgttttgtgagtggaggaagagtaggttgtttataatatttagtgagtatttgagatatttttttaaatttaattgttttttagtgtggtagtgaggtttttttgtgttttttttagggtggttggtggtgttatagatgatttggtgtaaagtgatgttgttattgaattttatgatgatggtttttaggttattggattttgtgggtgtgtgtgtgttggtagttattatgtgtatgatgttattgtggtgtagttttgttatgttgagtttagtttagaaattttgttgagatgttagttggtttttggtgtatttgtttatttgttttatggttataggaatattgtggtaagttgttttgtatattgagttaaattttttagtttttagtttttgtagtaagtatatttgtttttagttaatggagtattaggttagttggtgtggtagttgtggggtttgaggaagagtggtttttagaagtagttttgtaggtagttttgagggattgttgtagggttgtgtgtttattgatggggaaaatttgttttggaggtaggggtgtagggttaggggtgagggtattgtattttgtagggggatattagggttgttggagtgaatgaagagattaggggaaattgtgggattttggaaatatgattgattatttttttgttttattttatttttttttttttttttttttatttgttttaaatgagttatatttgtgttgttatttagtaagagtttttattagatggagggagaaattggaatgaagtatagttattttttttagatgaaagtattttttttttg

SEQ ID NO: 323 - DNA, 2501 bp, Artificial Sequence
  chemically treated genomic DNA (Homo sapiens)
taagttttttatgtgtattttattgtgttgtttttttatttttagtttatttttttgtattttaatttggaaggtaagaatttaattaggatgtattgaataattggtagaaatttatgtgaatgtaattattttgtttagttttttaatttgtgttaagtttaggtaggtatttgaagaaaaaaaaaaaaaagtatgaaggaggtttttgtttaaatggtattatatttgggggattttgagtagggttgaaatagtttttgtaaaaattataattgaggaaattatggtagtgataaagattagatttaaatgatttagttttttttttaatttttatgttgtttttatttatttttgggtataggttaaattaattttagaaaggaatttagtttatggtttgatttagaaataaaattaataatagtttttttttgaaaagattttttttttgtttgggtgttagtttgtttttgtatgattaatttattagttataatattagaaattatggtttaggggttttgtggtgttaggttgtaagagtttgaatttttttaagttgttgttggggataatattgttattgtaaaatttaatattttattttgtagattttgtattggatggattagttgatattatttagattgtgtgtgatttggtttaattagttttgtgattttatttaggaatagaagattgtaagaaaatgttattttaatttttttgtgattttatttgtaatttgattaattagtattttttaagttttaagtttttatttgttaaattatttttaaaaatttttagaggtagggtgtagtggtttaatgtttgtaattttagtattttaggtggattatgagattaagagattaagattagtttggttaatatggtgaaattttgtttttattaaaaatataaaaattagttgggtgtggtggtgtgtgtttgtaattttagttatttaggaggttgaggtaggagaattgtttgaatttgtgaggtagaggttgtagtgagttaagattatgttattgtattttagtttgggtgatagagggagattttgtttgaataaataaataaataaataatttttggaatgtttggggagattgatttgagtattggaattttagtattttaggaggttaaggtaggtggattatttgaggttaggagttttagattagtttggttaatatggtgaaattttgtttttattaaaattagaaaaattagttgggtgtggtggtgggtgtttgtaattttagtattttgggaagttaaggtaggtgaattatttgaggttgggagtttaaggttagttttaaattggtgaaattttgtttttattaaaaatataaaaattatttgggtatggtggtatgtgtttgtaattttagttatttgggaggttgaggtaggagaattgtttgaatttgggaggtggaggttgtagtgagttgagattatgttattgtattttggtttgggtaatagagtgagattttgttttaaataaataaataaaggaatgaaaatttttggtttttggtatggtaagttttgtgtgaattattttttttattgtaatttttttgttttgataaatgggttttgtttaagtagtgggtaaggtgaatttgttgggttgttataggattagtgatagattaagggtatgttattgaaggaatttttagatgtatttttttggatgtgagataggtggattttatttatgtttgttagtagttttttggagaattgtgtttttgggttagttttggtttagaggagtgttggggatttgtagagtgttgttgaagttaaggttataatttatttaggatttggggtgttagttttttggtgggtagggtgttttttttttttattttttttttgtatgatgatattaagtgtttggtgttgagttgttttataaaagttgtttggggaagttaggagagtgaagggtggatgtatttgttatggtatttaggttgtgtgtatgtggttttggtgtgtagttggagagtgagtggttattgggagtttttggtatagtttgtgtttgttttgtaggagtttgtgaagatgttttggtgtagtttgtatgtggtggttgtgtttttgttggtgattttaaaggaatagttttttagtttggttttagtgaatggtaaagtttttgtttgttttttttttaatatttttgagtgtttagttgtttttgggttgaaggttttttaatgataaagtaaaattattgttgtggggagtagggaaggtgtagtattaaatagtagatttttaagaaaggatgttttgtttttttttgttgaggttgggttgggaagtatgttgttttttagtggtgtttggtgtagatttggtgttaaaatgtttgtgtgtatttttgggtattgttagttttgaagatgtggtttgggaatttgttaattagggaggagatgtaaagt

SEQ ID NO: 324 - DNA, 2501 bp, Artificial Sequence
  chemically treated genomic DNA (Homo sapiens)
gttttgtattttttttttggttagtaagtttttaagttatatttttagagttggtggtgtttgggagtatatgtaaatattttaatattaaatttgtgttaagtgttattagaaagtaatgtgttttttgatttaattttagtaaaggaaaatggagtatttttttttgagaatttattatttggtattatattttttttgttttttgtagtaatgattttattttattattgaagagtttttagtttaggggtggttgagtgtttaggagtgttaggaaagaagtaggtggaaattttattgtttattggggttgggttggaaggttgtttttttaagattattagtaggagtatggttgttgtgtgtaggttgtgttggggtatttttgtgggtttttgtggggtgggtgtgggttgtgttgggggtttttggtggttgtttgttttttagttgtatattgggattgtgtgtgtgtagtttgggtgttgtggtgagtatgtttgttttttgtttttttggtttttttgggtagtttttatggagtaatttaatgttaaatatttgatgttattgtgtggggagggggtgggggaggagaatgttttgtttattggagggttggtgttttagattttaggtgagttgtagttttgattttagtagtattttgtgggtttttggtgtttttttgggttagggttgatttaggaatatagttttttgaggagttgttggtaggtgtgggtgagatttgtttgttttatatttagaagggtgtgtttagggatttttttagtggtatgtttttggtttgttattggttttgtaatagtttaatgagtttattttgtttgttgtttagatagagtttatttattaagataggggagttgtaatggagaaagtaatttatgtagagtttgttgtgttggagattggaggtttttgtttttttgtttgtttgtttgagatggagttttgttttgttgtttaggttggagtgtaatagtgtgattttggtttattgtaatttttgttttttgggtttaagtgatttttttgttttagttttttgagtagttgggattataggtatatgttattatgtttagataatttttgtatttttagtagaggtggggttttgttagtttaaggttggttttaaatttttgattttagataatttatttgttttggttttttaaagtgttgggattataggtgtttattattatatttggttaatttttttaattttagtagagatggggttttattatgttggttaggttggtttggaatttttgattttaaatgatttatttattttggttttttaaagtattgggattttagtatttaaattagtttttttaagtattttgggagttgtttgtttgtttgtttgtttagatggagtttttttttgttgtttaggttgaaatgtagtggtatggttttggtttattgtaatttttgttttatgggtttaagtgatttttttgttttagttttttgggtagttgggattataggtatgtgttgttatatttagttaatttttgtatttttagtagagatggggttttattatgttggttaggttggttttgattttttgattttgtgatttatttaaagtgttgggattataggtgttgaattattgtattttgtttttgggagtttttaaagataatttggtagataggggtttgggatttggggagtgttgattggttaggttgtagatgggattataggggggttgaagtaatgtttttttgtagttttttgtttttgggtgggattgtagaattggttgagttagattatatatggtttgagtggtgttagttgatttatttagtgtagggtttgtaaaataggatgttagattttataatagtgatgttatttttagtagtaatttgggaaggtttagatttttgtagtttgatgttgtaggatttttaaattataatttttaatgttgtaattaatagattaattgtataaaggtagattggtatttaggtaagaagggggtttttttgggaaagggttattattgattttgtttttgagttaaattataaattgaatttttttttaaggttagtttggtttatgtttaggaatgaataaggatagtatgaaagttagaagaaagattgagttatttaggtttgatttttgttattgttataatttttttagttataatttttgtaaaggttgttttagttttatttagaattttttaagtatagtgttatttgggtaaaagttttttttatgtttttttttttttttttttaggtgtttgtttggatttagtataggttaaggaattggataagatagttatatttatatgagtttttgttaattgtttagtgtattttgattaagtttttattttttaagttgagatgtaaagagatgaattgagaataggagaatagtatagtggggtatatatgaagagttta

SEQ ID NO: 325 - DNA, 4165 bp, Artificial Sequence
  chemically treated genomic DNA (Homo sapiens)
tatttaggtgtgatgatttttgttgttagtagagggtatatttattttatttttgtaaatttgaatgtgggtgttgtttagagagggggtggagggaaagatgttttgtagtaaaatttagtatagtgattggttgttttttgtgtttgtggtaaaggtttggaggtaggagtaatttgtaatttttaaagttgaattgtgtagtgtattggatttggaagttattatatttatttaatatttgaatgttgagttgtaaatttaatgggtaataatttattttgaatagtgtatatgttatatatgtattttttttttttgaattgtttttttttttggaggtggtggagggagagaaaagtttatttaaaatgtttttgggtgagggattaaggatgagaagaatgttttttgttttttatgttgtggaataatataaaataaaaaattttgagggaatatatattatatattaaatatagattattttagggagtaaataaattatgtgtggggttgggtaattagttaagttgaagtgtaaataaaatgtgaatatatgtttgtgggttatatatagtgtatttttattagtatttagaaaaaattgtgagttagtgaattaggaaattaatgtttggaaggtagttaaattttaattagtttaagatttttttttttttaaaaaaaggtatggaagtaatatttttttttttttttttgattagaattgatgtattttttgtgtatgattgtatttttaataataaaaggggaaagaggatttggaaaggaattaaatgtttggtttgtttggggaggaaagagttaatggttttttttataagggtttttgttgatttttttggtttggtttataagttttttatttgttttttttaggaagtttggttttgtggtttgggtattttttgttttttttatatttttttgtttagtatttttgattttttttaaatttggtagtttgagattgttgtaaattggtgttatagggtgtaaaggggatttgttttttttgaaatttggttgagaaattgggaattttgtgtgggaggtgtgggggtgggatggtggggtatagattggtagagagtaggtaattttttttttgttttagtttagttttggaataggtagatatattttagggttaaatagatgttttttgtatggggttttatggaagtttgagtaggtggggtaggaggggtggtatttgttgttttggtagtaaattgggggatttagtttgggtggaaggtatttaatttagatagttgtgtatatataatgtataatatatgattttttttaataaatgtaatgggagtttatttataatgtgttttttaagtatatgtggtaatgtgttgttgggttattttaattattttaggtattgtttttttttttatgtttttattatttttttttatttatattaatattttatgttttgaatgtgtgtttattaatattttttttttttttattttttttgggatttttgattaaagtgtggttttttttttagttttagtgaggtgttttgtagtttggtatgtgtgtggtgtggtggtgggtgtgtagtgtgtttttggtgtggagggtagttgttttgtttgtgatgatttatatttataggataaggatgtggtttgttaaatagtattgttatggaggagtagtagagaaagggagagggtttgagagggagtaaaagaaaatggtaggtgtgtgtagttaatttatgtggtttttttattttgtttatattttagagttagagtgtttggttgtttggttgagttttttttttattttttttattttttttattttttttataagtgttttttttgggtttttaaagtagagggtgtgggggaaaagaaaaaagatttttttttgttaatttttgtttattggttttttataatgtgagggtttggatggttgaggatttttgagttgtgttgtttgtggttgttattgttgggttttggttgtttttggttttttttttgttttgagaagggtagggttttttagaggtttggtgggaaaaagaatggagggagggattgtgttgagtataaaagttggtttttggggttttatttaatttgttgtagtaattttagtgagaggtagagggagtgagtgggtggttggttagggtggaagagttgggtgagtagagttgtgttgtgggtgttttgggaagggagatttggagtgaatagggggttttgtttttggtttagtttttttgttgattttttagttagtggtttgtaatttttgttgtatttatgaaattttgtttatagtagtgggtgggtattttgtattggaatttataatatttgagtaaggatgtgatttttttgatgtggggaggttattttgtttatttggggatatttttttgttgttgttaggatttgtttttttgaaaggttttttttgtagttgtttagatgttggattttttttgggtagtggaaaattaggtaagtattgaagtttatttgttttttaatttatttttttattattttaatgttgagatgagttgaatgtttaaatagggtgtttttttttttatttttgtgttattgatattttttttagagtagttatggtaattggggttggggtggggggtaatttagaattggattggggtaaagtgatttgttaagatgggagaggagaaggtagagggaaaatgggaatggtttttaagattatttttttgagatttttgttttatgaatatatttatgttgatttttggttggttggatatttttgttttattgtgttaattgttttttgggttttggggggttgggggttgttttgtggtgggtagaaagttttttgtattttgagttttttggagtagggattgtatattgtttgtgtgagttagattgttttgtagttgttgatttgtttttgtttttgggagggtatttaaattttggtttattgtatttttgatagttggagatggatattgtggtgtgttttgtttgtttgtttttgtggtgattttaatttgttttgatttttttaagaagttggtatttggttttttaaaaagtaataatataatttaaaatttgggtttttagaggtgttaggatgtggtgttgggtaggtgtaggtaggggaaaagggaggtgaggatgtgtttgatttttttggaattgttgatttggaaaaattagggtgaatttttgtatttagttttgatttttttgttgtggttgtttttgggtgtttttgtgtttgagatgtggaggaattgtgaggagtggggttttgggtggttttagaatagttgttatttttggtggggtggttttgggggaggtattgtagtggggtttttggtgtagttgtatttttgtattgagtgtgaagggaggtgtttttattattatttgatattttttttgtatttatggaggggtgttaaagtttgtggttgagtttgttattttagttggtgagagaaagaagaaaagttggtaaaaggagtgttggatgggggtggtattgggggtggggatgggggtggtggagagggaaggttgggaggggttgtggtgttggtgggggtaggagagtggttagggtgtgagtgggaatagttgtagtggaggggttttggtgtggagtggggtttatgtagttgttagtgtttaggtgttttttgtttttttttttaggtggtgtaaaattttgtgttttggattttggtaaattgttttttttattgttattttttgtggttttttaagggtgttagggttgattttgatttttttgttgttgtggggttgatttttgggttttgtgttttgggtttttgggggagtgggggtttggtgggtattaagttgttggtttattaagtgtgtttttgagatagtaggggattgtttaaagggggtgaaagggtgttttttttatttttttattaagattatttagttgttttaggggatagttttgtaaggggagaggtttgggattgtggtgtgtattgtgtgttgtgttaggtttttgtattaagatttttttaatttaagattgttttttgttttgtgtgttttgttttagt

SEQ ID NO: 326 - DNA, 4165 bp, Artificial Sequence
  chemically treated genomic DNA (Homo sapiens)
gttggagtggggtatataaagtgggaggtagttttgagttaaaggggttttggtgtggaaatttggtgtagtgtgtagtgtgtgttatagttttgaatttttttttttgtagagttattttttaaagtggttgggtggttttggtgggggaataaagggagtatttttttattttttttggatagttttttgttattttggagatgtatttagtgaattagtggtttggtgtttgttgagtttttgtttttttgggagtttggagtgtaaagtttgggagttggttttgtagtggtagaggaattgaaattggttttggtgtttttaagaagttgtgggaggtggtggtgaggaaaataatttgttaaaatttaaggtataaagttttgtgttatttgaaggagaaggtgagaggtgtttgggtgttagtggttgtgtgaattttgttttgtgttggggtttttttgttgtggttgtttttatttgtgttttagttgtttttttatttttgttggtattgtagttttttttaattttttttttttattgtttttgtttttatttttagtattgtttttgtttaatattttttttgttagtttttttttttttttttgttggttggagtggtgagtttagttgtgggttttaatatttttttataaatataaggggggtgttaaataataataggggtatttttttttgtatttaatatggagatgtaattgtgttagagattttgttgtgatattttttttggagttattttattaagggtagtagttgttttggaattgtttagagttttgttttttgtagtttttttgtattttgggtgtgaggatatttgagggtggttgtggtaggggagttagggttgggtgtggagatttgttttggtttttttaagttaatgattttaggagaattggatatatttttgtttttttttttttttgtttgtgtttatttaatattatgttttaatatttttagagatttaggttttaaattgtattattgttttttaaaaagttaaatgttaattttttaaaaggattagggtgggttggaattgttgtggggataggtgggtgggatgtgttgtagtgtttgtttttggttgttagaaatgtggtgagttgaaatttaaatgtttttttggagatggggataagttagtggttgtggagtgatttggtttatataggtgatatgtggtttttattttaaggagtttaggatgtaaggggttttttgtttattgtaaagtaatttttagttttttaaaatttagagagtaattaatataataaagtaggaatgtttgattggttgggagttagtgtgaatatatttataaggtagaaattttgaaagggtagttttaaaaattatttttgttttttttttgttttttttttttttattttgataagttattttattttgatttagttttggattattttttattttagttttagttattataattattttgagaaaagtgttaatagtgtaggaatgggagaaaagatattttatttaggtatttgatttattttagtattaaagtgataaaaaaataaattaaaaggtaagtggattttggtgtttatttggttttttattatttgaaaaaaatttagtgtttaagtagttgtaaggagagttttttagagaagtgggttttggtagtggtggggaagtgtttttaaatgggtagaatagtttttttgtgttgggagagttgtgtttttgtttgggtgttgtaagttttagtgtaaagtgtttgtttgttgttatgggtaaagttttgtggatgtggtaagggttgtggattgttggttgggggattagtgggagggttgggttagaggtgaagttttttatttgttttggatttttttttttaggatgtttgtagtgtagttttgtttgtttggtttttttattttagttggttgtttgtttgttttttttgttttttgttggaattattatagtgagttagataaagttttgaaaattggtttttatatttagtgtgatttttttttttgtttttttttttgttaagtttttgagaagttttgttttttttgaggtaggaggggagttagggatggttggggtttggtggtggtggttgtgagtagtatagtttgggggtttttagttgtttagatttttgtattataaagggttggtgggtggagattagtgagagaggattttttttttttttttttatgttttttgttttgggaatttgggaggggtgtttatggggagggtggggagggtggggaaggtggggaggagatttagttgggtagttgagtattttagttttaggatgtaaatagagtaagagagttgtatgaattaattatgtgtgtttattatttttttttgtttttttttaaattttttttttttttttgttgtttttttgtagtagtattgtttgataaattgtatttttgttttgtgagtataaattattgtaggtggaatagttgttttttatattgagaatgtattgtgtgtttattgttatgttatgtgtgtattaggttgtagggtgttttgttaaggttggggaaagggttgtgttttgattaagagttttagggagagtggaggaaagaagggtattaatgggtgtgtgtttagagtgtgggatgttagtgtagatagggaggaatgatagaggtataaggaggaaaatgatgtttagaatgattaaaataatttagtaatgtattgttatgtatatttggagagtgtgttatgaataaatttttattgtatttgttggggggagttatgtattatgtattatgtatgtatagttatttggattggatattttttatttagattgagttttttaatttgttgttaaagtagtagatattgttttttttgttttgtttgtttaggtttttgtggggttttgtgtgggaggtgtttgtttagttttgagatgtgtttgtttgttttagagttgggttagggtgagagggaggttgtttgttttttgttagtttgtattttattgttttatttttatgttttttatatggagtttttaattttttagttaggttttagaagagataaattttttttgtgttttgtggtgttggtttgtaatagttttgggttgttgggtttgggagaaattaaaggtgttagatgggagaatatgggaggggtagggggtatttgaattgtgggattggattttttaaaaggggtaagtggagagtttgtggattgagttgggggagttagtagagatttttgtgaaaaaaattgttaatttttttttttttggataaattggatgtttaatttttttttaggttttttttttttttttattattggaaatgtggttatgtataaaaaatgtattgattttgattaaagaagaggagaggagtattatttttgtgtttttttttgggggggggggagttttgagttaattaaaatttggttgttttttaggtattaattttttagtttattgatttataattttttttgaatattagtgaaagtgtattgtatgtaatttgtaaatgtgtatttatattttatttatgttttgatttagttagttgtttagttttatatatgatttgtttgttttttgaaatgatttatatttaatatataatgtatatttttttgggattttttattttgtgttattttatggtatgaaaaataaaaaatattttttttatttttggttttttatttaaaggtattttaagtaaatttttttttttttttattatttttaaaagagaaaataatttgggggaaaggggtgtgtgtatagtatgtatgttgtttaagatgggttattatttgttgagtttgtagtttagtgtttaagtgttaagtgaatatagtagtttttaaatttgatgtattgtataatttagttttaaggattgtaaattatttttgtttttaggtttttgttgtaaatgtggggagtaattaattgttatgttggattttgttgtaaagtgtttttttttttgttttttttttgggtagtatttgtgtttaggtttgtgaaagtaaagtaagtgtgttttttattggtagtagagattattgtgtttggatg

SEQ ID NO: 327 - DNA, 1501 bp, Artificial Sequence
  chemically treated genomic DNA (Homo sapiens)
agtttaggagtttgaggttgtagtgagttatgattgagttattgtattttagttttgatgttgagtgagattttgttttttaataaaatatatttaaaatttaaaaagaagattatataaaggggttatttattattttggttagtaatgtagggtaaaatttgaaataatttggttttgtagtattttttagatgttaaatttttattttttattgtatagtttttatagtgttttgtgtgagatgagagggagtatggtgggttttagttggttttgttttgggaaaaattttttatttttgtattgtttttttaaagtgggggttaagttagtgttgtttgtttttttatttagattagattttttttttagatgtttttatttttttgaagttttataataattttgtgaggtaagtattattatttttttattttatagatgaaattgaagtttaggaaggttatgttttgggttttaaattttggaatttttgttttgatgttatttaggtttgggttattgagtttaagaaatgggttgatgggtgattagatggatgttgggattagtttaagtttagggttgagggttgttaggtggtgtgtttttttttttttattttttgtggtggtttgggtgtatttgaatttagtggggtgtgttggggaaagtaggtgtgtagggtggggtggggagtagttttaattttttagtttggagtgggtaaggagtatggtttagtttagttggttggtattgttaagtggttgttgggttgtattagttttttttttgtttgtgttttttagtgtgtaatttatttggggggttattggggattgaatggagtgggtgagtgttgttaggaggtggggttggttttatttgttgattgtttgtagtaggtagggagagggtggggtttgttttatagggtttgttttttagtttttgggttttgggtgtgtgatgagatataaggtagttaggaaataatgtgtttgtagtttgtgtttttgtgttgattttgagagtgtttgggttgttgtgtgtgagtgagggagggtgtgtgtgtggggggggtgtgtttgtgagtgtgggttgtgtttttggtggtgtgtatgtgtgtgtgtgttggttgttgggttgttttgagttggtggggagttggtttgttttaggtggtgggtggttggagtgaggtgaggttgtgggtggttagggtatgggtgtgggttttgtggtgtgggttggttgtaggttgttttttgggtatggtgtgtttttgtttggttttgttgggttttgggagttgtgttttgggtggtgttggtaaagtttgttttgaatttgttgtttatagttgggtttgtgtgttgtgattggttttttttattattttgatttggggtttggttttttgggatgtgaggattgggtgtaggttgtaagttggtggggttggggaggaatgagagtttggtagttgattgtg

SEQ ID NO: 328 - DNA, 1501 bp, Artificial Sequence
  chemically treated genomic DNA (Homo sapiens)
tataattgattattgaatttttgtttttttttaattttattaatttataatttatgtttaatttttgtgttttgaaaaattgaattttgaattaaaataataaaaaaaattaattgtaatgtgtgaatttgattataaataatgaatttaaaataaattttattaatgttgtttgaaatgtaatttttaaaatttgatgaaattgaatgaaaatgtgttgtatttaaaaaataatttataattaatttgtattgtgaaatttgtgtttgtattttaattatttgtaattttattttgttttaattgtttgttatttaaaatgaattgattttttgttgatttgaaataatttgataattaatatatatgtatatatgtgttgttgaaaatgtgatttgtatttataaatgtgttttttttgtgtgtgtgtttttttttgtttgtgtatgatgatttgaatgtttttgaaattgatgtgaaaatgtgaattataaatgtattattttttaattattttatattttgttgtgtgtttgaaatttaaaaattaaaaaatgaattttataaaataaattttgttttttttttatttattatgaataattgataaataaaattgattttattttttaataatgtttgtttgttttgtttaatttttgataattttttaaataaattatatgttaaaaaatgtaaataaaaaaaaaattaatatgatttgatgattgtttaatgatattaattgattaaattaaattgtattttttatttattttgaattaaaaaattaaaattattttttgttttattttatgtgtttattttttttgatgtattttgttaaatttaaatatgtttgaattgttgtgaaaaataaaaaaaaaaaaatgtgttatttaatgatttttaattttaaatttaaattaattttgatgtttgtttaattatttgttgatttgttttttaaatttaataatttaaatttaaataatattgaaatgaaaattttgaaatttaaaatttgaaatgtaatttttttaaattttaattttatttataaaataaaaaaataataatatttattttataaaattattataaaattttaaaaaaataaaaatatttaaaaaaaaaatttaatttaaataaaaaaataaatgatgttaatttaatttttgttttaaaaaaatgatataaaaataaaaaattttttttaaaataaaattaattaaaatttgttatatttttttttattttatataaaatattataaaaattatataataaaaaataaaaatttaatatttaaaaaatattataaaattaaattattttaaattttattttatattattaattaaaataataaataatttttttatataattttttttttaaattttaaatatattttattaaaaaataaaattttatttaatgttaaaattaaaatataataatttgattataatttgttataattttgaatttttaaatt

SEQ ID NO: 329 - DNA, 3025 bp, Artificial Sequence
  chemically treated genomic DNA (Homo sapiens)
tttttatgatttgatttttatagttgttttatttatgggttttttataaattaggggtatagaggagtattgaaagttagtttagaggtgagtgtgtgtagttagtgttttttgtggatatagtagttgggtgttggagaggtttggaaagggtgtgttggagagttaagtgttagttgtttagggtttgttggttgttttttttttttttgtttggtaggggatttagtgtgtatgttagtgtggaggggtgggttggttggttagttttgggttttttggttattttggggattttttttaagttttgtttttgagtgtttttattggttttggatttttttttttttagttgtttgtttgggttttggggtgtttaggttattatggataaatagtttagggtgtttggttgagaagttaggggtgaggaagttttggggtgttgttgttgttttttttaattataaattaggttggataggagagggaggggtgggggatagtgggtggggatttagattgttagtattttgttatttatagttggggtttttgagtggtagaaagttttggttattttttgttgtttgggttgggtgaaagttaggattgtgttgtgttattgttaggatatggagttattgttgttattgttttgtgatgtagatttgatggtttttgatggttttttttgtttttttgttataatggatgatttttatgatgatttgtgttttgattttttggatttgtgtttttttgaagatttggatttgtgtttgatgtatgtgggtgtgtttttgaaatttgaagagtatttgtatttttttgtggtggtgtatttggttttgggtgtatgtgaggatgagtatgtgtgtgtgtttagtgggtattattaggtgggttgttgtttattgtgggtttgtaaggtgtgtaagtgtaagattattaatgttgattgttgtaaggttgttattatgtgtgagtggtgttgtttgagtaaagtaaatgaggtttttgagatatttaagtgttgtatgttgagtaatttaaattagtggttgtttaaggtggagattttgtgtaatgttatttgttatattgagggtttgtaggttttgttgtgtgattaggatgttgtgttttttggtgttgtagttgttttttatgtgttgggtttgttgtttttgggttgtggtggtgagtattatagtggtgattttgatgtgtttagtttgtgttttaattgttttgatggtatggtaaggttgggattttaggaagtgaggaagttagggtggtgtttgggatattagggatgtgtttttgagggtggggagttggttttgtgggaggtttgggttaggattttttttgagagagaggatttttttgttttgggtagttgttattggggtagtttgttttggaagtgtgtgggtaagtgtttgagttgttttattgggggtgttattagaatattgtagtgtgaatgtgaagatttttttttttatttatttttatttttaaaatgtaaatttgtgttttttggtgattgtttgtttttggtttggttttgtatgttgtagattttattttttatttatttgtaattatttttttaattaggataggtttgggtttggaattagagttttaggttagagttagggagggggtggttataggaattggtgtttgggttttgagttgttttgtgggtttgatttagttgtttttgttgtttgtagatggattatagtggttttttgagtggtgtttggtggtggaattgttatgaaggtgtttattataatgaggtgtttagtggtgggtattttgggtttttttttgtttgtttttttttttttatggagttgttttggtttttatttaggatgtttttatttttatttatatatgtttatgttttgggaagtggtgtaggagatgaaatattaagtaagtagttttttgtttttttgattgttttggattttaattaaagtttttagtttttaatttgttttaaagtattgggtttgggggtgggaggtttgttgtggttttatttttgtttattaattgagttttttttgtgtagaatttaggtttgggaagagtgtggtggtgttgagtttagattgtttgtttagtattgtggagtgtatttttattgagagttttgtggtgtttgtttttttgttggtggatgtgttttttgagttgtttttgtgtaggtaagaggttgttgtttttagtgagggagagagtagtggtgattttatttagttattggatgttgttttgtagtgttttgtgggtgtgaattttaatttgatatattaggtgttttgaggggatggtggttgtttatttgtttgagggatggtgtttttagggttttttgtgtttaaaagattgaatttaaatgttttttttttaatagtgttttaaaagtgattttttttgaggtaggagaggtgggagaattgaagtttttgtttttgttttatagggtaaggatatagtgtggttttttttatgtagtattttttttggagatttattgtgatggttgttttgtgttttttggtgggttagagttgaattttgaggggttaggtttagtttttttgtgtttttttttatgggggtgagatttttgtagatttaattttgttttgggatgtattggttatttgggggggtgtgagatttagtgtattttggttttaaatgtagtaggtgtaattgtaatttatttttaatttgttttttggtttaggattattttttgtaatatttttgtaatttatttttgtaaataagagttgttttgttagagtaggagtttttggggttgtatttatttttgaggtatggtgtgtggtgttatagggaatttgtatgtttatattgtaggtgggtgagttgtgggtgtttgtttaggtgattaaaataaaggtgttaatttatattgttgtggttttggttttttttggatatgggtgtgggattt

SEQ ID NO: 330 - DNA, 3025 bp, Artificial Sequence
  chemically treated genomic DNA (Homo sapiens)
ggattttatatttatgtttagggaaagttggagttatggtggtataaattagtgtttttattttgattatttgagtgagtgtttgtggtttgtttgtttgtggtataaatgtataaattttttgtagtattatatattatgttttagagataaatatagttttaggggtttttgttttggtaaagtaatttttatttataggaatagattataaaagtattataaaaagtggttttgaattgggaaatgggttgggggtgggttatggttatatttgttatatttgggattggagtgtattgggttttatgtttttttaaataattggtgtattttggggtagggttaggtttgtgagggttttatttttatgggggagggtgtgagaaagttgaatttagttttttaaggtttagttttggtttattgaggaatatggagtggttattgtaatgggtttttgagaagggtgttgtgtggaaaaaattgtgttgtgtttttgttttgtggggtgggggtggaaattttagtttttttgttttttttattttaagagaagttgtttttaaagtgttgttgggaggggggtatttaagtttaattttttgggtgtgagggattttaggggtattattttttgggtgggtgggtggttattatttttttagagtatttggtatattgggttggggtttgtatttgtagggtattgtggggtggtgtttggtgattgggtggggttgttgttgtttttttttttgttgggggtggtagttttttgtttgtgtggaggtgatttagaaggtatgtttgttagtaggagggtgggtgttgtagggtttttggtggagatgtgttttatgatgttggataggtagtttaggtttgatattgttgtattttttttgggtttgggttttgtgtggggagggtttggttagtaagtaggggtggggttgtgataagttttttatttttgggtttagtattttgagatagattggaaattgaggattttagttagagtttgggataattgaaaagatagggagttatttgtttagtattttattttttgtattattttttaggatataggtgtgtgtgagtgggggtgggagtgttttagatagaggttaggatagttttatgaaggaggaggagtgagtagggagaggtttggaatatttattgttgggtgttttgttgtagtaggtgtttttgtagtagttttgttgttgggtgttgtttggggggttgttgtagtttatttgtaaatagtaagggtgattgagttaggtttgtgggatggtttgaggtttgaatattaatttttgtagttgttttttttttaattttagtttaaggttttagttttgggtttagatttgttttggttgggggggtaattatgggtgggtaggagatgaggtttgtaatatgtagggttaaattaagggtggatagttattaaggggtgtaaatttatattttggaagtagggataagtagagaaaaagatttttatgtttgtgttgtagtgttttaatagtgtttttaatggggtagtttgaatgtttgtttgtatatttttaaaataggttattttagtgatagttgtttaggataagggggtttttttttttgggaaggattttggtttaaattttttgtaaggttagttttttgtttttggaaatgtgtttttgatattttgagtgttgttttaatttttttattttttggggttttggttttattatgttgttggagtagttggagtgtgggttggatgtgttggagttgttgttgtagtgtttgttgttgtggtttgggggtagtgggtttggtgtatagaaggtggttgtggtgttagggggtgtggtgttttggttgtgtagtagagtttgtaggtttttgatatagtggatggtgttgtgtaggatttttattttgggtaattgttggtttggattgtttgatgtgtagtgtttgagtgttttaaaggttttatttattttgtttaggtggtgttgtttgtgtatggtggtggttttgtggtggttggtgttggtggttttgtgtttgtatgttttgtaggtttatagtaggtagtggtttgtttggtggtgtttgttgggtgtgtgtatatgtttgtttttatgtgtgtttggggttgggtgtattgttgtggggaagtgtgagtgttttttgggttttaggagtgtgtttatgtgtattaggtgtgggtttaggtttttgaagaagtgtaggtttggggagttgaaatatgggttgttatagaagttgtttgttgtggtaaaggagtagagagagttgttgggggttgttaggtttatgttgtggagtggtggtgatagtagttttatattttggtggtggtgtggtatggttttggtttttgtttaatttaagtggtagagagtggttggaattttttgttgtttgggagttttggttgtagatagtaaagtgttggtagtttgaatttttatttattgttttttattttttttttttttgtttggtttgatttgtggttaaggaaagtggtggtagtgttttagggtttttttatttttagttttttggttaggtgttttgggttatttatttgtagtagtttaaatgttttggagtttaggtgggtagttgggggagggggagtttgaggttaataggaatatttgggggtggggtttggggggggtttttggggtggttgaggggtttgagattggttagttagtttgtttttttatattggtgtgtgtgttaggttttttattgggtagggagggagggagtgattggtaagttttaggtggttgatatttggttttttggtatgttttttttaaatttttttaatatttgattgttgtatttgtgggaaatgttggttgtgtgtgtttatttttgagttgatttttaatatttttttgtatttttgatttgtgggggatttatgggtagagtggttgtagaaattaggttgtgagag

SEQ ID NO: 331 - DNA, 3287 bp, Artificial Sequence
  chemically treated genomic DNA (Homo sapiens)
gaatatttttggtttagagtgttgtagatttatgaattgttgtttgttgaaataaggtgtaaagtttattttgtttaaagtttttaataggagtgataatttaggtaaaatgtttatataatagtgggaaattaaaagtttgtgatatagaaaagtgatatatatttgtaaatttttttaataaaggtattgtagtataagtatgattgtagagttagattgttaatgtttaaattttttttgggttttaatttttttatttgaaaattgttaatagtggaatttagttgatagggttgttgtggagtaagtgtttttaatttggagtttatgaaattttagtatttgtgaattttgtattgaaaaaattgtaattttatgtttattaattttataatagttttgtttttttgaattataaaggtaggtaataaattatagtagtattattagtatttataattttgttttttatagaaattatttttatatttagtaagttgttgtagatattttgaataattatatgtatatattttttaagtattatatatataatatttttatattttgtatatatttttggagatagggttttgttttgttttttaggttggagtgttgtagtatgattggaatttattgtaattttaaatttttgggttttagtgatttttttagttttagttttggaatagttaggattataagtattttttattatatttagttgttaattttttttttttttgtaaagataaggttttattattttgtttaggttgttttttaatttttggatataagttttttgtataggttttttaaagtattgggtttataggtgtgagttattgtgtttggttaatattatgtatttaattttatgtgtttagaaatatgtgttattttaagaaggtgtttataggttttattatattattaaaggtgtttatggtataagtgaagaaatttttagatattagagtaataaaaattatgatgtattagaatggattaggtttatattaaatgtttaatatatagtttgttgttatggttttttttttttttttttttttttttttgagatagagttttattttgttttttaggttggagtgtagtggagtgattttggtttattgtaatttttgttttttgggtttatgttatttttttgttttagttttttaagtagaggaattgtaaggtgttttattatgtttggttattttttgtatttttagtagaaatggggtttttttatgttatggtaggttggttttgaatttttgattttaggtgagttatttgttttagttttttaaagtgttgggattataggtatgagttattatgtttagtttgttatggtttttaaaatatttatagaatagaaattgaagtaagtttatttgtttttatattaaaagtagttagtatggtgttttgtatttatgtattttatggatgttgaatgagttattgaatgaagtggagtttaggttgtgttttaggttttttagtggggttggaaggaatagttgtgaagttgtggggtggtttttgtgtattgggggattttggagttagatggttttttagggttttgaaggagaagagttgtgtttttaataatgattttaatgggaatagagattgttggggattgtaggggttaggttgttattttttaaagttttttttttattatttaagaaggtatttaggtttttttgtgttaggttttaggtaaagtgttggattatttagtaattgggtttagtagtaggatggttttagattgaggttttagggttaaaggattatttttttttttagtgttggtttgggaaaggtaagttttgggtgggagtgtatgttgtgtttttgaagtttggtttttttgttatgtttattttttgtttttattttgtgtttttttaggtttttttttggtgaattggatgttttgttagtttttttttttgtgtttttggttgtggtttgggttttttgtaaagttgttgttattttggagggtttagttagtgggtttttggaggttggttgggtaggtgtggtgtgtggtaggagttgggtgtgtatggttattgtgtgtggaggagatattgttttgttgtgatgggggtttggggtgtttttttatgttgtaggtaagtggggtggtggttgtggtatttgttttattgggagttttttttttttttttttgttgttgttgttttgtatttagtttgggggaggatagaagaaaaaggaggtagaatggatttttttggtttttttttgtgggtgggggtgggttagggtgggttgtgttgttaggtagttttgttgtgttgttaggtagtttggttgttggtgtgggtgatgttggtgttggggtgggagttgtgagggtgggaggttttggggtgtttttgggatgtggagttagtagggttttgatttgaaaaatgatggtaaagtgtgtttttgattgtttttgagtattttatattttttagatttagggtgtttttatttttagttggaagtttagtttagagtaatggtgttattaaaaggggtgtgttggatgtgaaaatattttttggaagtatttataagtttgtaggaaatatgttttttttatttttttattttgttttttttattatttattttaagaagtaatagaatttgtgtagagtgtgttttaagttatattgtatgtttatttttgtttatgttgaatttggtgtatatttgtgagaataagtttgtattttttattttgtgtaagtataatagaatatattgagagtgtgttttaagttattttgtatgtttattttatgttgaatttagtgtatatttgtgaaaataatttgttatttattttatgtggatttatttttgaagtttatttaatttgattttaattttaatttattattaattttgaaaaggttgagatttgaagtgattggttgtatttaaagtaggtggagtgtttgtaagttttaattatttattatggatagttgatttagttgttttagtaaaaatagttattttgggaatgtgattagggtttttaattgtggattattttggtgagagttatttgtttatataattgaagatagttttttttggttaagttgtatatttatatagggtttaaaatttgaattgggtttaagatattaataaaattttaatagttgggtagagatagtgaaaaaatatttttatatgtagagtgattgtttttt

SEQ ID NO: 332 - DNA, 3287 bp, Artificial Sequence
  chemically treated genomic DNA (Homo sapiens)
gggaaataattattttgtatatgagggtatttttttattgtttttatttagttattaaaattttgttaatattttaaatttaatttagattttgagttttgtgtaggtgtataatttaattaggaaaaattatttttaattatgtaagtagataatttttattaaaatggtttataattagaaattttagttatatttttgaaataattatttttgttgaagtagttagattaattatttatgatggataattagaatttataaatattttatttattttaaatataattagttattttaaattttaatttttttaaagttaatggtggattaagattgaaattagattgaatgaattttagaaataaatttatataaaataaatggtaggttatttttataagtatatattgagtttaatgtaaagtaaatatataggataatttaaaatatatttttaatatgttttgttgtatttgtataaaataaaaaatgtaagtttatttttataagtatatattgagtttaatataaataaaaataaatatatagtgtaatttaaaatatattttgtataggttttgttgttttttgaaatgggtaatgaagggagtagagtaagaaaataaggaaaatatattttttgtaggtttataaatatttttaaagggtatttttatatttaatatattttttttagtggtattattgttttaagttgggtttttagttgggaataaaggtgttttgggtttgaaaggtgtgaggtgtttagaagtagttaagaatatgttttgttgttgttttttaagttagaattttgttaattttatgttttggaaatgttttagggttttttatttttgtggtttttgttttagtgttggtattgtttatgttggtgattaggttgtttagtaatatggtagggttgtttggtaatgtggtttattttggtttgtttttgtttataggggaaggttaaggggatttattttatttttttttttttttgtttttttttgagttggatgtagagtagtagtagtaggagaaggaagggaaagtttttggtggggtaggtattgtagttgttgttttgtttgtttatggtgtgaaggagtgttttgggtttttattgtggtagggtagtgttttttttatgtgtggtagttgtgtgtgtttagtttttattgtgtattatgtttgtttggttagtttttgggagtttgttggttgggttttttgggatggtagtggttttgtgagggatttgggttgtggttgaggatgtagaggaggagattgatagagtatttggtttattgggagaagatttggaaaggtgtgggatgggggtaggaagtgggtgtggtgagggagttaggttttgggggtgtggtgtgtgtttttgtttggagtttgttttttttggattagtgttgaggagaggagtggttttttggttttgggattttaatttgaggttattttgttattgaatttaattattgggtagtttagtattttatttggggtttagtatagaaagatttgaatgtttttttggatgatgaaggggaagttttggggaatgataatttggtttttgtggtttttagtaatttttatttttattgagattattattaggaatatagttttttttttttagagttttgggaaattatttaattttagagttttttgatgtatagaagttgttttataattttataattgttttttttagttttattggaaggtttgaggtataatttagattttattttatttaatgatttatttagtatttatggagtgtataagtatagagtattgtattagttatttttaatataaaaatgaatagatttattttaatttttattttatgaatattttaagaattatagtagattggatatggtggtttatgtttgtaattttagtattttgggaggttgaggtaggtggtttatttgaggttaggagtttaagattagtttgttgtaatatggggaaattttatttttattaaaaatataaaaagtagttgggtatggtggagtgttttgtagtttttttatttgggaggttgaggtaggagaatggtataaatttgggaggtagaggttgtagtgagttgagattattttattgtattttagtttgggagatagaatgagattttgttttaaaaaaaaaaaaaaaaaaaaaaaaagaattatagtagtagattgtatgttgaatgtttgatatgggtttgatttgttttaatgtattatggtttttattattttagtatttagagatttttttatttgtgttatgaatatttttggtaatgtgataaaatttgtagatgtttttttaaaatagtatatatttttaaatgtatgaaattaaatatatagtattagttaggtatggtggtttatatttgtaaatttaatgttttgggagatttatgtaggaggtttgtgtttaagagttggagagtagtttgggtaagatagtgagattttgtttttatgaaaaaaaaaaaaattaatagttgggtatggtggggagtatttgtagttttagttattttaagattgaggttggaaggattattagagtttaggagtttgaggttatagtgagttttgattatgttatagtattttagtttgggagatagagtaaaattttgtttttaaaaatatatatagaatataaaaatattatatatataatatttaaggaatatatatgtataattgtttaagatatttgtaataatttattgagtatgaaaataatttttgtaggaaataaagttgtaggtattgataatattattgtggtttgttgtttgtttttataatttaaagaaatgaaattgttgtgaggttaatagatataaagttatgatttttttaatataaagtttatagatgttgaaattttatggattttagattaagaatgtttgttttataataattttattaattaggttttattgttaatgatttttagataaagaaattaaggtttagaaaaaatttgaatattgatagtttggttttatagttatgtttatgttatgatgtttttgttaaaggagtttataaatatatattatttttttgtattgtaagtttttgattttttattattatgtgaatattttgtttgaattattatttttgttaaaaattttagataaaataaattttatattttattttagtaaataataatttataaatttgtagtattttgaattagaagtgttt

SEQ ID NO: 333 - DNA, 6343 bp, Artificial Sequence
  chemically treated genomic DNA (Homo sapiens)
gattgtttatttttgttattagttgaaggtaaggttgttttgttatgagtgttttttaatttttataaaatgaaaagaaaaaaagggaggattattagtttattatttagaggaatggggaggttgtaaaaattgttgatgggtagaggtgaagatgttttttttggattgtattttttggtgttttgtaattagagtttagttgtgggatttgttgaagaaatttgatttttttgttttggtgagattttaaaaattagaaatagaaatttttagagttagagaggaaatataattaaatagtatgtgggtatttttttttttatttttttttttttaaataatattgttttgagtttttattgggtaaagagagaaagtttgagtttttatggatgttatgtggaggttagaaatggtttaaaatgtagatttttaattagttttttttgtggttgaagaggttaattttttttataaaatgagtttatttgttgattgttagttattttaaagtgaagggatttagtatttaaaataaattgagtaagtttgtttgtttgtttttattgttaatttaaatgaatttaaaatatggagtaatttaagaaaatatataatatgttttagatagtttttaaaagtagggaaagtttagtatttatatagtgattagggttagttttaagtgttaagtttttttaaatgtatttattttatgtatatttttttgagttattatatatttttaaaattgtgagtattggtatattgatttaggaagagtaatataatttttagagggaattttatttttaattagggattaaagagatgtttttttaatagtgggtttgagttttgtttttaagtaggaattaatattggtgggaaaatttgaatttaggagtaatggttgtgttttggtattttttaaaaatatatattaataggatgtttttgagattgaaaaaatattgttttatatgtttggtagaagtttttatatttggttttttaggtgaattatatttatagtttttttatttagaggtaggatagagttaaaatattttgtttattattaaaatatatatttttgtttaagttaagaaattagaaaattagggtttagaagtaaggtatattttttgagtgagaatatgttttgtaattttatatattttttgttttgtaggagtaaatgtggatttgagggaaatttttttttttatttttatttttattttgtgtaatttaatattatttttgttaggaattttaattttgttattttaaaaaatgagatatttgtgatttagggtgaatttgttgaatgtaggtatagtagaggaaattttagattttatgagtgtttgagttttgtttagtgtaaattttttgtgaatattgggttagtgtgtggttgtgtttatttgtgtgttgatatttttagtatgtttggtttatttgttttgattttgggtgtggtgttttagttaagttgggtttagtgttttggttttttttagttgataagtttagtttgtttgtttttggttgtggtttttttatttttttttattagtttattttatttttttagatttttttttatttatttttttttatttttattgtgtttatttttatttttgttttttattggttttttatttttttttttttgtagtttttttttgttgtgatttttttttttaattttgtaggtttgaaagaaggttatatatgtatgtttatatttatattttatatgttttgttttaaataattttatgaatattgttttttgttttgttttttgggttattttttttgttgtttttttttagtttgttttgatttgttttttaaaagtatgtttttgtttttttgttgttttggtgttttttttttgatttattagggttgttgggttggtgtagattgttttttttttttttttattttatttttttttttggtttttttttttatagtgggagtttgtgtttttgttttttggttggtttttaagtgttttgttaggttttttttttttttgtttttttggttttggtttttgattttttggtttgttggtatttgttttttttttttgttttgttttttgttgtttttgtttgttttttttggtgtttgtttgggtgttgtgtttgtttttggattgttagttgtgtagtgggtttgttggtgtttgtgtgttattgtgtagtggagtttggtggaatttttgttgatgttatgttattttttatatggagtaggagtagagggaagagagagggatgagagggagggagaggagagagagtgtgagattgagtgagaaagttggagaggagtagaaagaaattgttagtggtggttagattttggaggttttagtgtatttgtggatttttttggaatttggtatttttaggagttttgtagtttttttaggtttggtttttgggtgtttgttgtgtagttggaggtttggtttgttggaaattgttttgggaagtagtgggatgtggagatagtagtttttttttggtagttggtaagtggaggttatttattttgtagggatgtgagataatgtgagtttggaaatttgttttattttggagaatttttattgtaggtgatttgtggtttttggggttaagttttgtttaaggtaatgtagttggtaaatagattttgtaaagttttgttttttttgttttttgttatagatattaataatttatagggtgttgaagttgagagggaagttagattgtggttggtatttaaaatgaggtatttttttttaaattttggtgttaatattgtaggaataaatttttgggttaaggattagtatttttaagataaagggttgggtataaagttttagttattggaagattagttttttttttattgttatttattgggaaaaaaaagaaaagaaaaagattttattttaattggtagttagtgattttttaggtttaagtgaattatttgggagttaggtttggatgttaagtttttattatttttttggattgtaatttttttaaattgattattagttaattttaatttggtattttaggagatatattttaaatggatgtagagaattattttttagttggagattaagaaaaaaatttttgattttaaatttttgaaatatgttttttttttttagtttaattattttatttttttaagtaatttagaaattaaattattataaggtggtgtgatttttttttatttttttgtgtgagtattgttttattaaattaaatggaaaaaatttttattattataaatgtaaatattagaatttatatattttaaaatatttttatgaaaaattaatttgatttaaagaaatttttttgtatttgttttagtttattaattaaaattaaagatgtttttattatataaaatattattttggtagaaatttatttaaaatttaaatattaataatattaagaaaataaagtatataagtaaaataaattgaagatttttgttgatgtaatatgagtatataatattttaataattaaattttttttaaaaaattaaatagttattttatttgtggaatgttttattttaatttagtaaaattatatttaaattatttaggtgttttgttttttaagttaagtgtgtttgtttttaaatgtttttaaagtatttatattaattggttgtaaagaatgtatatatatggtaaaatatagaattgaattgagtagtattttaatttttttaaataattatttattataaattaatttattggttaattttataatttagtttatttaaaatatatgtttttgtgttgtttatttttaaattttttattaaagattttgttatggggtaataaagtgtatgaaaaggggggaaatgtgaaaggatttgggattatttgaattgtattttttttgtatttttagttttgtggtagttattagaaattattttttagtaaattgttttattttttagggtttgtttgtttgttttgttatggttttttgttttttgttagttgtgtagtgttttttgtgtgtttataatataaaatttaagttggttaaaataagagtttttggtatatatattttaattagaatatgaattttgggggtgagaattattttttattaggaaaagttttttattttaatttgtgagattagttattgaagttagttttgaagtttggtagttaaattttttatagaagatttgttttgatagggtaagtttaaggattagtaggtgggaattggaggtttttttttaaaaaattattttttttagttatttagatttagtttttttagtaggtttggttattaaatgaagtataaaaatgtaagttttaaggtttattttgattgtaaaataaatttttaagttataaggatatgtaggagtgagttaaggaatatgttttgattttttttttagtttttagagtggagttttatgagtttttgaagatttgttttgtattgttttgtttggtttttagtattgaagtatggggaagtggggggaagaatgtgtaataattgattgattttatattaagtaatgtaattttttttttttgtatattttattttttaaaaaaaataaataaataaaaattatttgtagttattatttgtagtgttttggttattagttaataatgtagttagtttagatatataaaaaaaaaagattattgaaatgatgatgatatgtaaattttttttgaaattattataagtaaatatttgaagtttggattaataaaattttatttgtgttattttatattgagttagtagaaagttgtgataatgaattttgtaatattttatgaatagatattttaattagggattaattttgtgattttattgtagaattattaaatttggagttgttaaattgttatttttgggtttatgggtttataaggattgaattggtagagtttttgtttgtgtttttgttagtgggtgggggaattgtttggttgtttttattttggatttttatgttatagtgttgggtagttttttttgtaggtagtgattttggttagaggttttttagggtttagttttttttaggagaggttgagatgtagggaaatggtatttaggttagaggtaggtttgtagttttttgttttgtttttgtgtttttgttaatttgataatgtttgtttttattttgatttttgtatttgtgtgaagtgggttttttggttgttggtgtattttggttagtgtggagagaggtaggtgttgagattgaaggggtttagggagttttggattttttttttttgtttttaaagtaattgtggtttttttatttatttggtggagttttttgagatttattttttttggtttgtttgtggtagagaagggggagtgtgttaaatgtttggtttgttgtgttgtggttgaaaatgtgaaaaagatttggtttgtttgggagagaaagggggagaattgggtagtagttatattagagttatttttttgtttttggtgggtagtaaattttttaagaatgtttgttttgttttttttagttttgtttagtttatttagtgttttttttttgtgattttaaattatattttagggtaattatttgtagtaagtaaataaatggttgggttagtatttttaggagaaagtgtggttaaatatggaaaagtggtttttgatggatgagaggtttgaatttagtttgtttttgaaatattttaggttaagagtttgtttgttttagaattatagaaaattgagggaaattgttgtttaggataggggtatgttggtgttgatgttttataaatgtttattgagttttaattaatggataagtattgaagggtggtttttgtatatagttttttaaagagaaaagttttttttatttatttatttttgttgttattgtgtttagatgagtttttaattttggtattgagatttttgaaagtaggtttatagtttttttagtatattgtggttttatagttttttaatttttgggtatttttgtggtaattttggagggagatttttttttgataaataaatgttttgggtttgaggttaggttggagatgttgttgtatatgttagaggttgttaggttggaaaaatatgtttgaagtttagtatatagtaggtgtttaatagttagtgtaatgtagttttatttgagttttgtttatttgatggttgttgttttttatagtttttttttttttttgttttgtaga

SEQ ID NO: 334 - DNA, 6343 bp, Artificial Sequence
  chemically treated genomic DNA (Homo sapiens)
tttgtaaaatagaagagaaggaaggttgtaagaagtggtggttgttgagtgagtagggtttagatgagattatgttatattagttgttaggtgtttattgtgtgttaggttttaggtgtgtttttttgatttgatagtttttggtatgtgtagtagtatttttagtttagttttgggtttaggatatttatttattaagaggggatttttttttagagttgttgtaaaagtgtttagaggttagaggattataaagttatagtgtgttggggaggttgtggatttatttttaagaattttggtgttggggttaagaatttatttgaatgtaatggtagtgggagtgggtgggtggagaggatttttttttttgggaagttgtatgtaaagattattttttagtgtttgtttattagttggagtttggtaaatatttgtagaatattagtgttaatgtgtttttgttttagatagtagttttttttggttttttgtaattttgaaatgaatgggtttttggtttagggtgttttaggagtgagttgagtttgggttttttatttattaggagttatttttttatatttagttatatttttttttagagatattaatttggttatttatttatttattataaataattattttaaagtatgatttaagattgtagaggagagatattgggtggattgagtgagattgaggagagtagggtaaatgtttttggagggtttattgtttgttaaggatggagaaatagttttggtataattgttatttagtttttttttttttttttttgggtgagttaaattttttttatgtttttaattataatgtagtgagttaagtatttaatgtgtttttttttttttgttataggtaagttgggagaggtgggttttgaggggttttattgggtgggtagaagagttgtggttgttttaaagataagaaaagaaggtttagggttttttaggtttttttgattttagtgtttgtttttttttatgttaattagggtatgttgatgattggagggtttattttgtgtgggtgtggggattggggtgggagtaagtgttgttgggttggtggaggtatagaggtggggtagggagttgtgggtttgtttttggtttgagtattgtttttttgtgttttggttttttttgaagggagttgggttttggggagtttttggttaaggttgttgtttataggaggggttgtttggtgttgtggtgtggggatttagggtggggatggttaggtggtttttttatttgttagtgagaatgtgggtggggattttgttgatttgatttttgtgggtttgtgggtttagaagtagtagtttggtggttttagatttagtgattttgtagtaaaattataggattagtttttgattgagatgtttgtttgtgagatattataaaatttattattatagttttttattaatttgatatgaagtaatatagatgggattttattagtttagattttaaatgtttatttatgataattttggaggaaatttgtatgttattattattttgataattttttttttttatatgtttgaattggttgtattattagttggtagttggagtattgtagatggtaattgtaaatagtttttatttatttattttttttaaagaatgaaatatataaaagaaaaagattgtgttgtttggtgtaaagttagttaattattatatatttttttttttatttttttgtgttttagtgttgaagattaaataaagtaatataaaataaatttttaagaatttatagagttttattttaaggattgaaaagaaggttaaggtgtgttttttagtttatttttatatgtttttgtgatttggagatttattttgtagttaaaatgagttttgagatttgtatttttatgttttatttaatgattaggtttattagaagaattgagtttaaataattggggaagataattttttaaaaagagatttttaatttttgtttgttgatttttaaatttgttttattaagataagttttttgtgagaaatttggttgttagattttggaattggttttaatggttaattttataaattgagatgggagattttttttgatgggaggtagtttttatttttaaagtttatgttttagttggaatgtatatgttaaggatttttgttttggttaatttgggttttatattgtgagtatataaaaagtattatatggttaatggaggatgaggaattatggtaaagtaggtaggtaagttttaagaaataaaataatttgttaaaaaataatttttgatgattattgtaagattgaaagtgtaggaaaaatatagtttgaataattttagatttttttatattttttttttttttatatattttgttattttataataaaatttttaatggaaagtttaaaaataaatagtataggaatatgtgttttaaatgaattaaattgtgaaattagttagtaaattaatttgtagtaagtaattatttaaggaaattaaaatattgtttagtttagttttgtattttattatgtgtatgtgttttttataattaattaatataagtgttttaggaatatttgaagataaatatgtttaatttaaggaataaagtatttaaataatttaagtgtaattttgttgagttaaagtaaaatattttataaatgaagtggttatttaattttttagggaaagtttggttattgaaatgttgtatgtttatgttatattaataaaaatttttaatttattttgtttatgtgttttgtttttttgatattattggtatttgaattttagatggatttttgttaaaatgatattttgtgtgataaaagtatttttagttttgattgatagattaaaataaatgtaaggaaatttttttaaattagattaattttttataaaaatattttagaatgtatgaattttgatatttatatttataatggtaaaagttttttttgtttagtttagtaagataatatttatataaaagagtaaaaaaaaattatattattttatgatagtttgatttttaaattgtttaagaaagtaaagtggttaaattggaaaagaggaatatattttggaggtttagaattgaaaattttttttttaatttttagttggaaaataattttttgtatttatttaaagtgtattttttgaagtgttagattggagttgattggtgattaatttaaaggagttataatttaaagaaatggtgagagtttggtatttaggtttggtttttaggtaatttgtttgggtttgagaggttattaattgttagttaagatggaattttttttttttttttttttttttaatggataataatgggaagggggttaattttttagtagttgaaattttgtatttagttttttattttgagaatgttaatttttggtttgaggatttgtttttgtagtgttggtattgagatttaagggaagatattttgttttaaatgttagttatggtttggttttttttttgattttagtattttgtagattgttagtgtttgtggtgggggatgaaaggaatagggttttgtaaggtttgtttgttgattgtgttattttgggtgaaatttagttttaaaagttataaattatttatggtgaagattttttgaagtggaataaatttttagatttgtattattttatatttttgtgggatagatggtttttatttattggttattgggagagagttgttgtttttgtgttttattgttttttggggtgatttttagtgagttgagtttttggttgtatggtaagtgtttgaaagttgggtttgagaggattgtagggtttttgagggtgttaagttttgaaggagtttatgggtgtattggggtttttgaaatttagttgttattggtagtttttttttgtttttttttagtttttttgtttggttttgtattttttttttttttttttttttttattttttttttttttttttgtttttattttgtgtggggagtgatgtgatgttagtagagattttattaaattttattgtatagtggtgtgtgggtgttggtgagtttgttgtgtggttggtgatttaggagtgagtatagtgtttgggtgagtgttggggggagtgagtaggggtgatgagaaatgaggtaggggagggaagtagatgttagtgggttgaagagttgggagttggagttgggagagtgaaaggagaggggatttggtggggtatttaggagttaattgaggagtaggagtatggatttttattgtggaaaggaggattagaagggaggatgggatggaagagaagaaaaagtaatttgtgttaatttggtagttttaataaattaaagggggagtgttagggtagtggggagatagaaatgtatttttggggagtaaattaggatgggttgggaggaagtgatagggaaagtggtttaagagatggaataaaggataatgtttatggggttgtttgggatgaggtgtgtggagtgtgggtgtgagtgtgtgtgtgtgatttttttttaggtttgtagagttgaggaaagaggttatagtaaagagggattgtggagggaggaaagtgagagattggtagagggtgggagtggaggtgggtgtggtggggatgggagaggatgagtgaagagaaatttagaagaatggagtgagttagtgggagagggtgggagggttatagttgggagtgaatgagttaggtttgttagttggggaaggttgggatgttgggtttagtttagttgggatattgtgtttgaggttaaggtgggtggattaggtatgttgagagtgttggtgtataggtgggtatggttatgtattgatttagtgtttatgaagggtttgtattggataaggtttagatgtttatagagtttagaattttttttgttgtatttatatttaataagtttattttgggttatggatattttattttttaaaatgatgaggttaaggtttttggtgaggatggtattaaattgtatgggatagaagtgggggtgggggagagagttttttttaagtttatatttgtttttgtaaagtaaagagtatgtgaaattatagggtatatttttatttgaaaagtgtgttttatttttgaattttgattttttgattttttgatttgagtaaagatgtgtattttggtagtgagtagaatattttggttttgttttgtttttgagtggaaggattataaatataatttgtttggaggattaggtgtgaaggtttttgttaggtatatgggataatgtttttttaattttaagggtattttgttaatgtatgtttttggaaagtgttggaatatagttattgtttttggatttggatttttttattaatattaatttttgtttgagagtaaaatttaggtttgttattaaaaagatatttttttggtttttaattgagaataaagttttttttaaaagttgtattgttttttttaaattaatatattaatatttgtaattttagaaatatatagtgatttgggagaatgtgtataaaatagatatgtttaaaaaagtttggtgtttaaaattaattttagttattatataggtgttgggttttttttatttttgggggttgtttggaatatgttatgtgtttttttgaattattttgtgttttgaatttatttgagttagtagtaaaaataggtaaataaatttgtttaatttgttttgagtgttaaatttttttattttgaaatagttaatagttgatagatggatttattttatggaaagggttagtttttttagttatgaagaaaattgattagagatttatattttaagttatttttaatttttatgtaatatttgtgaaaatttaaattttttttttttatttagtggaaatttaaagtagtgttatttaaggggagagaaatgagggggaaaatgtttatgtgttgtttaattgtattttttttttgattttgagaatttttatttttggtttttgaaattttgttgaggtaagaaaattaaatttttttaataagttttataattgaattttagttataggatattggaaagtgtagtttgagaaagatatttttatttttgtttattgatgatttttgtagtttttttatttttttgagtaatgggttaataattttttttttttttttttttattttgtagagattaagaggtgtttgtagtagaatggttttgtttttagttggtggtgaggataggtaatt

SEQ ID NO: 335 - DNA, 5333 bp, Artificial Sequence
  chemically treated genomic DNA (Homo sapiens)
tgggatgtttgtttgtggttttagttatttgggaggttgaggtgggaggattttttgagtttaggagtttgaggttgtagtgagttatgattgtgttattgtattgtagttggagtgagagagtaagattttattagggtttataggaagttaattttttttaggattaaggatatgttatattagtttttttagtatttttttttttatattggaggtaggatatgttatatttggattttgggtttttttgggatatagtttgtaaattatttttttttgtgaatttatagtttagtaagtagggattggtatagggtaggttttaatatttatttgttaagtaatggtttggttaggttattgtgattaaggtggagtaggaaggtttgaattttggtataaaaagaaagaagttttatatgtagattttggggagtatgggagtgtaaggaagaaggggatagtatagagttatatgagggtaggggttttagagtattatagaggtgaggtttttagttttgtaggtttagaaagagtatgttttttgatttaggtatttggaattaatttgtttttttagggtttgagaaaatttgaatgtaatttgtgaattttttttgagaagtgttaatttttaataggattttggggtagtttgggagtaggttattttttaaagtaagtaaagaaatgaataaagtttttttagttttgtttttttagttaattgtttttggtttttgaagttttattttgttatagtttatttttaggttttttgtgtagatggttgtttattatatttggtttttatggattgattttttaaaggtttgggagtattgattaggttggagggaagggtaggtttttgaggttttatagtttttaggaagttgtgtatttgtttaatttttgttttttattttgtagattgtaaggtttataagagttaggttttattattattttttttagtttgtttttaagttggaatagagtatggaatgggtatataggagttagtatagtggttgtgatggtttaagtttgaagttggggtgttgatttagtgaggttatttggaattgtgtttttttttttttattagttgggagtttgatatgtttttttattggtgaagatttagttggttttttttttattttttttatatttgttttttagtttttttttttttttttgtttttattattttagatttattagtttttttagttgttatttaaggtattattttgtttttttatttttagttattggttttttaggatttttgaattaagttttttttttgtattttatagttattgttttagattagggtatttgtttttaggttgttagagtgattgttttattatgtatagttgattgtgttgttttttggttttaaattttttagtaattttttattatttatagaattggtttaatttttttagttaggattttgttttagtatattttttgggtattattttttatgaatttttttttaaatttgaaaatggttaaaattagtttttaaataggtttttgtaagagttattttttttgttttaagtgttttttgtattttattatttataattttaaatttttggtgaatttttattgtttttgtaggttttagttgtgggtttttttttttagaatgtttttgtttgtaggtttgtttttttattatatttatggtttttagaaagtaggggttgtgtgtggtttatttttgtatgtttagtttttggtaggatgtggtatgaagtagtgttagtgtgaatggatgaatggattaaagttgggagtagggttgtttttttgtagttttgttttattttttttgttttattgtaagttagtggtaggtttgtagttttttgtttttattttttttttgttttgggtgtgtttttaaaatttatagttggtttttttgttttttagaattgtttttagtttttgttttattttttttttagaggtgggttttgagttggtatttttttttttggatagtttaagggatttagttaattggtttatgttttttttttagtttttttttatgtattttaagatttaaattgagaattgaaattaagttggggtttatggagtttgtatttgtttgatttttgaggttttagtaggattttgtttggttttaggagtttattatgtttttttttgagattttttttgaaggttgttagtttagttttagttttagttttatagaggtattattgggttaggggatgatggggttaagttttgttggtttgttgtggtggggagaggtgggaagagagggtttaatggaggatttggttaagtattttagagagtgatataaagtgggaagtttagatattagggttttgattgttttgggtggggtagggaagggagggtaggatagagtagaaaagaggatatggaggagttggggtggttttgttgggttgtggtttttttattgagtagttgggtaaggtgagaagggttagtggtttttgggtttgggtttttttgtttatttttgagttttgttttaattttgttttagatgtaggattttagattagggaggatggaggtagtatttttgttgtgttggtttggagttaggggtatgttttaggtatggtaaaattaaaattaattttttagatttgaggtgagaaattggtttagattgaagaggtatttttgttaaggttttttagtttatgtggtttttgtttaaggaagtttttttaatgaattttttttttgttatattttttttgtttattttttattttttttgataaaggaattatttgggttttttgttttgttgttttttaggtttttttatttttttttatgaaagtatagaggatattgtattatagtaatttttataaatattattataattaagaataatattatttaataatattaggtaatatttatgagtattttaaatgtgttaggtattgtattaagtattttggtttttttttgttgttgtttgtttgttttgttttgttttttgtttgtttgtttatttgtttgtttttgagatggagttttatattgttgtttaggttggagtgtaatggtgtgattttggtttattgtaattttttttttttgggtttatgttatttttttgttttagttttttgagtagttgggattataggttatgttattatatttggttattttttatatttttagtagagatggggttttattatgttggttagattggtttttaatttttgattttgtgatttatttattttggttttttaaagtgttgggattataggtatgagttattatgtttggtttgtttttgtattttataaaatgtggtaaaatatatttaatggataagtttttatgttaattatttataagtgtattatttagtggtattaagtagatttataatattgtgtaattattattattatttatttttagaatttttttattattttagaaattttgtattttttaaattataggggagggaaagatggtttgtttttatttttttagtttttttggttgggttatgaattaaatagtttatgaattaaatagttataaaatagattattagtggaaaatttatatttaattatatatgtatatttaggagttttataatatatgagatttaaagaaaggttagatgattgaagtttgtataatattttgagttatggaaaagagtttggagtttttgggtgatggtgataatataagttatgggagggtgaggagaggagttgtttggtgaatagaggttgttttgttatgtagattaaaagtttttagataataaaagttgtttggagtagtttttttttaatatagattattttattaatgtagatttttttttaagatataaatgttttttttttttataaaaggagagttttttagagttatttttgtattagtagttttttagaataattagtttaaaatatgttaaagaagtatattttaagagttttttgtagttatattttgaagtggtgtgttttgagttttagtaatgtaatagttttttatttttttttttttttagtttttggtaatttttaatttattttttgtttttatgaatttatttattttagatattttatgtaagtggaattgttattagtagaggattttgattgtaaattgtttaggtttttggtattttgaataaagaattggataaaatgtatagtaaagtaaggaaagagtgaagtaatgaaagtagagatttattgaaaatgaaagtatattttatagggtgggagtggttagagtagggtttaaggattttagttatagaattttttgggttttaaatattttttagaggttttttattggttatttggtgtttattttattggttgtagaaagtaattaattagatgtatttttaattttttatttgttttgtaggaaatggggtgatttgtaaagagagtagttttttttttttttgttattgaggtatggagagttgtggttttttttttgatttagttttaggaagttagagggaattggttttaggttttttgtttttagattttatttttttgttttagaattatatagtgtttgattttttgtgattggtttattttatttagtataatgttattgaggtttatttatgttgtagtatgtattagaattttatttttttttaatgttgagtaatattttattatatgtgtagattatattttgtttatttatttatttgttgatggatatttggattgtttttatattttgtttattgtgaatagtgttgttgtggatattgttgtataagtatttgtttgggttttgtttttatattttttggttatatatttaagagtggaatttttgggttatattgttgttttatgtttatttttttaatgaatttttaaattgtgtattaagtattttatatgaggttggtatttagtgtatttattttttaaattgagttttttgaaggtagaatgtattttatattttttatattttagagtttattattgtgggtgatgagaagtagatgtttaataaatggtgtagtgagagttggagggtttgaataaatgggggtattggggtgttgataagttagggttttgtattatttaatgattggttggaatggaatatgaggttttattttagggtttagttgtaagggtggttggttggtaggtgggggtttttgggatttttttaggttttatttgtttttttggttttttagt

SEQ ID NO: 336 - DNA, 5333 bp, Artificial Sequence
  chemically treated genomic DNA (Homo sapiens)
gttgggggattagagaggtaggtgaggtttggagaagttttaaaagtttttatttattggttaattatttttatagttggattttggagtaggattttatattttattttagttagttattggatgatgtaaaattttggtttattagtattttaatatttttatttatttaggttttttagtttttattgtattatttattgagtatttattttttattatttatagtaataggttttgagatataagaggtgtaggatatattttgtttttaaggaatttagtttggaaggtagatatattaagtattaattttatataaagtgtttaatgtatagtttgggggtttattaaagaggtaagtatggaataataatatgatttagaaattttatttttagatatataattaaaagatgtaaaaataaggtttaaatagatatttgtataataatgtttatagtaatattatttataatagataaaatgtagaaataatttaagtatttattaatagatgaatagataaataaaatgtggtttatatatataatggaatattatttagtgttagaaagaaatgaaattttgatatatgttataatatagatagattttaatgatattatgttaagtgaaataagttagttataaaaggttaaatattgtatgattttgaggtaggagaatagggtttggaggtagggaatttaaggttgattttttttgattttttagaattaaattgaaaggaaaattgtaattttttatgttttagtaataaaaggaagagaggttattttttttgtaaattattttattttttgtagggtagatggaaaattgaaagtatgtttggttggttgttttttgtaattaatggggtgaatattaagtggttaatgggaaatttttagggggtatttggaatttagaagattttgtaattggggtttttgagttttgttttagttgtttttattttgtggggtgtatttttatttttaataaatttttgtttttattgttttattttttttttgttttgttgtatattttgtttaattttttgtttaaaatgttaagaatttgaataatttgtagttaagattttttattggtaataattttatttatatgaaatatttagaataagtaagtttatagggatagaaggtagattagaagttattaagggttaggggaaggagaaaatgaggagttattgtattattggggtttaggatatattattttaaagtatgattgtaggaggtttttgaaatatatttttttggtatattttaagttggttattttgagaaattgttgatataggaatagttttgaaaagttttttttttgtaaaaaagaaaggtatttatattttaaaagaaaatttatattagtaaaatgatttatattaaaagagggttgttttagataatttttattatttaagaatttttaatttatatagtaagataatttttatttattaaatagtttttttttttatttttttataatttgtgttattattattatttagaagttttaagtttttttttgtagtttaggatgttatataggttttaattatttgatttttttttgagttttatatattgtgggatttttgagtatatatatgtaattaaatatgggttttttgttggtaatttattttatgattatttaatttataggttatttaatttatagtttagttaaggaaattagaagggtggaggtaagttattttttttttttttatggtttaaagagtatagagtttttggagtaatgaaaaagttttggaaatagatggtggtgatggttatataatattgtgaatttatttaatgttattgaatggtatatttataaatggttaatataggaatttatttattaggtatattttattatattttgtaaaatataaaaataggttgggtatggtggtttatgtttgtaattttagtattttgggaggttgaggtgggtggattatgaggttaggagttagagattaatttggttaatatagtgaaattttatttttattaaaaatataaaaaatagttaggtatggtggtgtggtttgtaattttagttatttgggaggttgaggtaggagaatggtgtgaatttggaaggaggaggttgtagtgagttgagattgtattattgtattttagtttgggtgatagtgtgagattttgttttaaaaataaatagataaataaataaataaaaaataaagtaaaataaataaataataataaaaaaaaattaaagtgtttaatatagtatttggtatatttgaagtgtttataaatgttatttagtattgttaagtaatgttatttttagttgtaataatgtttataaaagttattgtaatatggtgttttttgtatttttatgaaggggagtaaaagggtttgaaaggtagtagagtaagaaatttaagtagtttttttgttgggggaggtgggaggtgggtaggaaaggtgtggtaagagaagggtttgttggggaggtttttttaagtagaaattatatgagttgggaggttttggtaaagatatttttttagtttgagttagttttttattttggatttgggaagttggttttagttttgttgtgtttgggatatgtttttggttttaggttagtgtaataggggtattatttttattttttttaatttgaagttttgtatttgaggtaaagttgaggtagggtttgagggtgggtggaagggtttaggtttggaggttattgattttttttattttgtttaattgtttagtggagaaattgtagtttagtgaggttgttttaatttttttgtgtttttttttttattttattttatttttttttttttgttttatttgagatggttaggattttggtgtttggattttttgttttgtgttattttttagggtatttgattaaattttttgttagattttttttttttgtttttttttattatagtaaattaataaagtttaattttattattttttaatttaatagtatttttgtagggttggggttggggttgggttggtggtttttagagggggttttggggggaggtatggtgggtttttggggttgggtggggttttgttggggttttggagattgggtgggtgtaggttttatggattttagtttagttttgatttttggtttagattttggagtgtgtgaagagaagttgaaggggaggtgtgagttagttggttgagttttttgagttgtttgaaaggggaggtgttggtttagggtttgtttttggagaggaagtgagatagaagttgggggtggttttagggggtagagaggttgattgtgggttttaaagatatgtttagagtggggaggaggtagaggtggagagttgtagatttattgttgatttatggtaaagtgggagaggtagggtagagttgtaggggggtagttttgtttttggttttgatttatttatttgtttatattggtattgttttgtgttatgttttgttgggagttgggtgtataaagatgagttatatgtagtttttgttttttaagagttgtagatgtaatggaagagtaagtttgtaaatggagatattttggaaaggagagtttatagttgggatttgtaaaagtagtggaaatttattagggatttagggttgtaggtggtggggtatgggggatatttgaaatagaaaagatagtttttgtaaaagtttgtttgggaattaattttggttatttttagatttaagagggaatttatgagaaatgatatttaaggagtgtgttaggataagattttagttgaggagattgaattagttttgtgagtgatgggaagttgttgaaggatttggaattagggaataatatgattagttgtgtatgatgggatagttattttgataatttaggagtaggtgttttggtttaggatagtggttgtgggatgtagaggagggatttgatttagagattttgggaagttagtgattggaggtgagggagtaggatgatgttttgagtgatagttggaaaggttggtggatttgaggtggtgggggtaggagggagggggagagttggagagtgggtatgaagagggtgaggggagagttagttaggtttttgttaatggaaaagtatgttagatttttagttggtaaggggaaaggggtatagttttaggtgattttattgggttagtgttttggttttaaatttaaattattgtaattattgtgttggtttttgtgtatttattttgtattttgttttaatttagaaatagattagaaaggatgatgatagggtttggtttttgtaaattttatagtttgtagggtggagagtaggggttgggtagatatgtaattttttagggattgtaaggttttaggagtttgtttttttttttagtttggttagtatttttaggtttttagagaattagtttatgaaagttaaatatggtgggtagttatttgtataagggatttggaagtgggttatggtaggatggggttttggaggttagaggtgattggttgaggaggtagagttggggaagttttatttatttttttgtttgttttggaagatagtttgtttttagattattttaaagttttgttggaagttaatattttttaaaggaaatttatgagttgtatttaggtttttttaagttttggagaggtaagttaattttaggtatttggattaaggggtatgttttttttggatttgtaggattgagggttttatttttgtggtgttttggggtttttgtttttatgtagttttgtgttattttttttttttttatatttttatgttttttgaagtttgtatgtgaaatttttttttttttgtgttaaagtttaggtttttttattttattttgattatggtgatttggttaggttattatttaataaataagtattgagatttgttttatgttagtttttgtttgttgggttgtgggtttataaagaggaataatttgtagattatgttttagagaaatttaaagtttagatatggtatgttttgtttttagtgtgagagaaggagtgttgagaaggttgatatagtatgtttttgattttggagaagattggttttttgtaaattttgatgagattttgtttttttgttttgattgtagtgtagtggtatgattatagtttattgtagttttaaatttttggatttaagagatttttttgttttagttttttaagtggttgggattataggtaggtatttta

SEQ ID NO: 337 - DNA, 5013 bp, Artificial Sequence
  chemically treated genomic DNA (Homo sapiens)
tagtatagagatgatgaatatttttgatattataataaaatgatttttaaaataatatttatgaaaaagaagttagggttgggatttagtggtttatgtttgtaattttagtattttgggaggttggggttagaggattgtttgtggttaggagattgagattattttgggtttttataattattttttatgtagagatgtggtaagattttatttttatattaaaaaaaaaaaaatatttagatatattagattatatgttgtatgtttatttatatgaagattattgtttaggggttgggtatggtggtttatatttgtaattttaatattttgggaggttgaggtgggtggattttttgaggttaggagtttgagattagtttggttaatatggtgaaattttgtttttattaaaaatagaaaaattagttgggtttagtggatagtgtttgtaattttagttatttaggaggttgaggtagagaattgttttaatttgggaggtagaggttgtagtgagttaaaattatattattgtattttagtttgggtgatagagtgagattttatttgaaaaaaataaaaaaaaaaataaaaaattagattatattgtttagggataaatagttgataaaataatagagataagtaagatataattattataaaaattaggatttggggttgggggtggagagggaaggtttaagtggaaagaatggagtggtgataatgtgtgttaatttgggttatggtgattttggggtttgttttgtaattttttaaaatgagtatttatgtgttatttattttttagagggtagaatttttgaattaaaatgtttaagtaattatatattaaaaaaagaaaaaatatggatagatttgtattttaattaaaatatttaaaaaatagagataagggttttgttatgttgttgagagtggttttaaatttttgggatttaattgatttttttgttttagttttttaaagtgttgagattttaggtgtgaattattgtgtttgatttggaaagatatatatatatatatatatatatattttttttttttttttttttttttttgagatagagtttagtttttgttgtttaggtttgagtgtaatggtttgattttagtttattgtaaattttgtttttagggtttaaatgatttttttgttttagttttttgagtagttgggattataggtgttttattatatttggttaatttttgtatttttagtagagatgaggttttattatgttggttaggttagttttgaatttttgattttaggtgatttgtttgttttggttttttaaagtgttgggattataggtgtgagttatggtgtttggtttggataaattttttaaaatataaaagtttgagtgagtttttggttggttggtatagatgttggggtggggttgtgaattggttgggatgtgtttgttttggtttggggggatttgggttagtagttggttgttgtgtgtgtgtattgggtggggggttttgtgtttttatttgtatgtggttagtgtttggtgttgggttgtagtttttgttgtgtatgttggggagttggtatatgtaggtgggaagttttatatggagaggtgtgttgtttttgtgatagggttttatttggtatattggtatggtagaattaaagtaaaagggggtagtgtgtgttaaaggttaatgtttagaaattgttagaggttatgatggagattggttattttttttttgattttgttgtgggtgtttgggaaaatgtagtttggtgtgttttgattggtttaggttttttgatgttatgaagttgatttttgatagagttaataggtgaaaaggagagatgggaagtatttttgttgttttgtttggaaagggtggagtataatgttgaaagtagttaatgggagtttaggaggtggagtgtttgtgggagttttggagggaatttttttagtttttgaggtggattgggtgttgtatttatggagtgagttgagagtttgaggtgagtggggtttgtagttttttggtgtttttttttgtgtgttttttttgagatttatggtattttaatttttttggaaatggggggaatatggttgaggtgtgtggtgaggtagttttttggaggttttggagtggtgattttagtgttgtagtgattttgtgttttttgggtgtgttttgaggttgaggtaagtttttttggggttttgggttgtgggtaaaggatttggttttgtgaggagttgggtttggtttgttttagataggttttgtttatattttattatagggttgtggatttgaagtgggagtgtgaaatttttatagattgaatgtattttttttttatttgttttttttttttttttatttttatttttatagtattttatttttaatttttttttgtagagatggggattttgttgtgttgtttaggttggttttgaatgtttgagtttaagtaatttgtttgttttggttttttaaagtgttggaattaaaggtatgatgtattgtgtttggtttttttaaaaaattaaggttattttggggatggtagagtgtttagatatatttttatttgtatagttgtgtagtttttaaaaatgtaatatgtttttatttgttaggatgtgtgatttttggttggtaagttatattgaattttggttagtatatttgtattttatgttagatttgtaaatgtaaatttgttttttgtatttaaatatattagatatatttaggtaattatatttaaatgtattgagatatttaaataaatttggggtttgtgtttaaatgtgttttttttttaaaataaatatttgaagtgggttgagagtggtgatttatgtttataattttagtattttgggaggttaaggtgggtggattatgaagttaggagtttatgattagtttggttaatatggtgaaatttgtttttattaaaaatataaaaattaattgggtatgatggtgggagtttgtaattttagttattttggaggttgaggtaggagaattgttggaatttaggaggtggaggttgtagtgagttgagattgtgttattgtagtttggtttgggtaatgtagtaagatttggttttaaaaaaaaaaaaaaaaaaaaattagaagtggatttgtagtttatagtgtgttgttaaataaatttatttttagagatatttttttttattttttgtgaggttatttgtagttttatatggtagatagatttaggtgagatttttagtaaggtggaatgaagagtaaagaggtttgtttattttagaagggtttattaaaggtttatgatgtgttaaatgttgtaggaaatatttagtgattttttttttatggaggttttttgtttttttttaataagttattaattaaattgtttgttggaaattgttaagttaatgaatatatgggatatattttttgagtagatattgtttgggtagaggaggaagaggagagtggtttagatagagatttgtttatatattgtagtgttttaaagagtttgtgatgtttaggatagttgtttattgtgttataatataggggatggttggttgtggttttttgtaattttagtattttgggaggttgaggtaggtggattatttgaggttaggagtttgagattagtttggttaatatggtgaaattttattttttttaaaaatataaaaattagttgggtgtgatggtgggtgtttgtaattttagttatttgggaggttgagataggagaattgtttgaatttgggaggtggaggttgtagtgagttgagtttatgttattgttttttagtataggtaatggggtgagattttgttttaaataataataataataataataataataataataataataataatgtaggggatttgatgaagggaaaggattagagagattttgaaaagaaggtagttttggttttaatgatgattaaattttaatttttatatagtaggaagtggggtattagtaaatttttaagtagaaaaattatttgattagatttgtgattttaaaaatagttttggtgatagagtggaggatgtattggagtagggaataaggggagataaaatttttataaaatttttaaagttagtatagtaagagttttgagggtttttgttaagatagtagttggtagttttagtttggagtggggtattaaaggtaattgtgtataaggaatagttatataattggtatttaatttttgagatgattttgatttaaatattgtgtattttttagtatattgttggtttttttaattatgttgggaaattatgttatttttatttttttttttgtttgttgtttaggttggagtgtaatgttgtaattttagtttattgtaatttttgttttttggatttaagtgatttttttgttttagttttttgagtagttaggattataggtgtttattattatgtttggttaattttttgtatttttagtaaagatggggttttattgtgttggttaggttggtgttgaatttttgattttaagttatttatttatttttgttttttaaagtgttgggattataggtatgagttattatagttagttatgtttttattttttaagaaagaagatattattgttgttaaagattttggtaatttgagagatataatgtatgttttttttatgtggattttagtataattagatagtaaggatttgttgaatttgaagtatttatttagaagtattttgggtatatgtttaaggattgtaaaatagtgtttttatttttggatataataaatgtatttgttaatataataaatgaatagattagatttataaattatttatagtgttgagttattttttatagttaaaattaggatgaaaatatatagttgaatatttgatttgttttttgtaattgatttttttagt

SEQ ID NO: 338 - DNA, 5013 bp, Artificial Sequence
  chemically treated genomic DNA (Homo sapiens)
attagagaaattagttataagaaataaattaagtatttagttatatatttttattttgattttaattgtgggaaatgatttaatattgtaaataatttatgggtttaatttatttatttattatattagtaaatatatttattatatttagaaatagaaatattgttttataatttttaaatatgtatttaaaatatttttggatagatattttaaatttaatagatttttattatttaattatattaagatttatatggagaaaatatatattgtattttttaaattattaaaatttttggtaataatggtgtttttttttttgaaaagtgaaagtatggttggttgtggtggtttatgtttgtaattttagtattttgggaagtagagatgggtggataatttgaggttaggagtttgatattagtttggttaatatggtgaaattttgtttttattaaaaatataaaaaattagttaggtatggtggtgggtatttgtaattttagttatttaggaggttgaggtaggagaattgtttaaatttaggaggtggaggttgtagtgagttgagattgtggtattgtattttagtttgggtaatgagtaaaaaaaaaaatgaaagtaatataattttttaatataattagaaaaattaatagtatgttgggaaatatataatgtttaagttaaaattattttagaaattgggtattagttatataattattttttatatatagttgtttttgatattttattttaaattgaagttgttagttgttgttttagtaaagatttttaaagtttttgttgtattagttttaagagttttataaaggttttatttttttttattttttgttttaatatattttttattttattattagagttatttttgaaattataaatttggttaaataatttttttgtttaaaaatttattagtgttttattttttattatatgaaagttaaaatttagttattattggggttaaaattattttttttttagaatttttttaattttttttttttattaagttttttatattattattattattattattattattgttattattgttattatttgagatagagttttattttgttgtttatgttagagggtaatggtatgagtttagtttattgtaatttttgttttttaggtttaagtgatttttttattttagttttttaagtagttgggattataggtgtttattattatatttagttaatttttgtgtttttagaagagatagggttttattatgttggttaggttggttttgaatttttgattttaggtgatttgtttgttttggttttttaaagtgttaggattataggggattgtaattagttattttttatattgtagtatagtgaataattgttttgaatattataagttttttgagatattatagtgtataagtaggtttttgtttaaattgttttttttttttttttttgtttaaataatgtttgtttaaagaatgtattttgtgtgtttattaatttagtaatttttagtaaatagtttaattgataatttgttaagagaaggtaggaaatttttatgaaagagaaattattgggtattttttatagtatttaatatattgtaggtttttaataaatttttttgaaataaataaatttttttattttttattttattttgttaagaattttatttaagtttgtttattatgtgaaattgtagatgattttatagaaaatggaaagaagtatttttaaaaataagtttatttggtagtatattataggttataggtttatttttgatttttttttttttttttttttgagattgagttttgttgtgttgtttaggttggattgtagtggtatgattttagtttattgtaatttttgttttttgggttttagtgatttttttgttttagtttttaaagtagttaggattataggtttttgttattatgtttagttaatttttgtatttttagtagaaatggattttattatgttggttaggttggttatgaatttttgattttatgatttatttgttttggttttttaaagtgttgggattataggtgtgagttattgtttttggtttattttagatatttattttgaggagggagtgtatttagatatagattttaaatttatttaaatgttttaatatatttaaatgtagttatttaaatatatttaatatatttaaatgtagagagtaaatttgtgtttataaatttgatatggaatgtaaatgtgttagttaagatttggtgtagtttattagttagaaattatatattttaataggtagaaatgtattgtatttttaaaaattgtgtagttatgtaaataaggatgtgtttggatgttttattgtttttaaaataattttaattttttaaaaaggttaggtatggtgtattatgtttttaattttagtattttgaggggttaaggtgggtggattgtttgagtttaggtgtttgagattagtttgggtaatgtagtgaaatttttgtttttataaaaaaaaattaaaaataaaatattataaaaataaaaataaaaggggagagagaataggtagaaaggaaatgtatttagtttatggggattttatgtttttgttttaagtttatggttttgtgatgggatgtgggtaaggtttgtttgggataggttgaatttaattttttatagggttgaattttttgtttgtagtttaggattttgaaggagtttgttttggttttaaggtgtatttaaggggtatgagattgttgtaatattgaggttgttattttggggtttttagggggttgttttgttatgtgttttggttatgttttttttatttttagggaggttggaatgttgtgggttttaaagagggtgtgtgagaggggatattggaagattgtgagttttgtttattttgagtttttagtttgttttatggatgtaatatttgatttgttttggggattgggaaagttttttttagggtttttataggtgttttgttttttgaatttttattggttgtttttgatgttgtgttttattttttttgggtggggtggtaaaaatattttttgttttttttttttgtttattggttttgttaaaggttgattttgtgatgttaaagagtttgggttaattagagtatattggattgtgtttttttgaatgtttgtagtagggttagaagggaggtggttggtttttgttgtgatttttgatggtttttgagtgttggtttttggtatgtgttatttttttttgttttggttttgttatgttgatgtattaggtaaagttttattatgggggtggtgtgtttttttgtgtggagttttttatttgtatgtattggttttttaatgtgtatggtaggagttatggtttagtgttgggtgttggttatgtgtaggtaggagtgtggggttttttgtttagtgtgtatgtgtggtgattggttgttggtttgggtttttttaggttggagtgagtgtgttttaattggtttatggttttattttggtatttgtgttggttggttagggatttatttagatttttatgttttaaaagatttatttaggttgggtgttgtggtttatgtttgtaattttagtattttgggaggttgaggtgggtggattatttgaggttaggagtttgagattagtttggttaatatggtaaaattttgtttttattaaaaatatagaaattggttgggtgtggtgaggtgtttgtaattttagttatttgggaggttgaggtaggagaattgtttgaattttggaggtggagtttgtagtgagttgagattgagttattgtatttgagtttgggtaataagagttaaattttattttaaaaaaaaaaaaaaaaaaaaaaaaaatatatatatatatatatgtatgtatttttttaggttgggtgtggtggtttatgtttggagttttagtgttttgggagattgaggtgggaggattaattgaattttaagagtttgagattatttttagtaatatagtgagatttttgtttttattttttaaatgttttaattaaaatataaatttgtttatattttttttttttttaatatatggttgtttaaatattttggtttagagattttattttttgaaaagtgaatagtatataaatgtttattttgaggaattataaagtgaattttagggttattatggtttaggttgatatatattgttattattttattttttttatttaaattttttttttttatttttaattttaggttttgatttttatggtaattatgttttgtttgtttttattattttgttaattatttatttttaaataatatagtttggttttttgtttttttttttgttttttttagatggagttttattttattatttaggttggagtgtagtggtgtgattttagtttattgtaatttttgttttttaggttgaagtaattttttgttttagttttttgagtagttgagattataggtgttgtttattggatttggttaatttttttatttttggtagagatggggttttattatgttggttaggttgattttgaatttttgattttaagagatttatttgttttgattttttaaagtgttgggattataggtgtgagttattgtgtttggtttttaaataatagtttttatataggtaagtatatagtgtatagtttgatgtgtttgggtgtttttttttttttaatgtagagatgaggttttattatatttttatataaaaggtggttatggagatttaaggtggttttaattttttggttataggtgattttttaattttagttttttaaagtgttgggattataaatatgagttattgggttttagttttggttttttttttgtagatattattttaggagttattttattgtaatattagaagtatttattatttttgtatta

SEQ ID NO: 339 - DNA, 3683 bp, Artificial Sequence
  chemically treated genomic DNA (Homo sapiens)
ggtattagtttattggtggagatgttgtgtttaggtaggtgtttttttaaaagtattttatttaaattgttgtgattttaaaataggaatgttttgtagggttattttgaaaagttttgagatagttaattttttttaaaaatatagatggggttttgttatattatttaggttagtttttaatttttggttttaggggattttttaattttggttttttaaagtgttgggattataggggtgagttattatatttagttttttgagatagtttttattttagttatgtaagtatgagttttttttttttatatttttagggttttattttgggttaataaatagtgagtttattttggtatgtgtaatttttaaatatttattgttataaaagaaaggattagttttggttaggtatagtggttgatgtttgtaattttagtattttgggaggttgaggtgggtggattatgagtttaggagattaagattattttggttaatatgtgaaattttgtttttattaaaaataaaaaaattagttaggtatggtagtgggtatttgtagttttagtatttgggaggttgaggtgagagaatggtatgaatttgggaggtggagtttgtagtgagttgagattgtgttattgtattttagtttgggtaagagtgagattttgttttaaaaaaaaaaaataaataaataaaggattagttttgattgatagttggtattttgtaggtattttttataatttttttttttttttgttttttgttttataatttggttatgttatgatttttttttatttgtttttttttgtggattttatgattatgttttgttttatgaggttggattagggttatgtttatttattttttttttttttttgttatttgttttattttttaatttgttttttatgtattgattttaatggagtaatagtaattagatgatgaaaataaataatggtggttagtttttaaatggattttttttttaattttgtattatttatttgttgtttttttattagttttttgtttttgtttttttttttttttaaattggataagtattgtattttgtgaagatgtgtgtagtttgtttttatgttttgaatattatttttttaagtttttttggttgttttttgtttaggttttagaaaaggagagttgggtaatttttttagggagttgtttgtttgtgtaatttttagtattagtttgtttgtttttttgagataattagttataatggttattttaaaataatggtttttttattttgttttttgtttttattttaaattttataaagttagaaattgtaagtttttgagtatttatagttatttaaggataaatttttgttgaatgttttaagtaaagagggggaggttgagtttttgtttttagggtgaaaatatgatggtttttattagttttgttttatgtgataattttaggttgaatttggattaatgtaatgattttttttgtatggatttatgttttgtttgtgtatttatttgtgtagttgggaatttgtagttttgtttattggtatggggatgttttggggaatggtagggtagagttataaaaagttagttttattatgtggtttgttgtttttagttattatgtttattatagtttgtggtaggagatgttggggttttttttttgattttttttaggaaaatagagtttgtggaggtggagtattttttaggtttgattgataaaataatttaaaagatttaaagagattttttgtttgttttgttttttgaagggttttgaatatggggtttttttgtttggtttttagtttgtttttttttttttattaggaaaggattttttttatttttgtagaagtttgattatttttttagagggtttgggaggaagtgggttttgtatatagtttttgttgattttagtgttttttgttggttttagatgtgagttttggtgaggttttagggtatagtttttttgtagttagaagttgggtttgtagtgttttagtattgttttgggatattttatttgttttttaggtgtgatttgttaataggtttgtattggtgataaaaggagtagttttgaatgtagggaaagtagggtggagttttttgtaggtttgggggaggggaggggtgtgaatgtgtggatttttgtggagagtggaaatatggggagttgaggggagtatgtgtgggttttagaaagttttgggaaattgatttttgggagtagggaggaatgtgtgttttagagagtaagttaattgatttttggggggtggtttttttagtttggggggttatagatagtaggtaaatttagagattatttagttaagggtaggggtattttttttagatttgtggggtggggtggggtgagatttgagtttaggggatttggaattggtttttgtattttgtattttattgaagaaaagggaggttgttagaagtatagatttaggatagagtttagatttggatgtttttgtgattttagaatattttgttttatatttttagttagttttttgtttttttatttgtttattgtattttttttttttattttgtttttattttattgtttggtgggaaaggttgtagttattatgtatttatttatttttattttttattttttattttttgattttttttttatatttttatttttttttttattttttgttttttttttttttttttttttaattttttgttttttttatatatttttattttttttttaatttttgtttttttttatttttatttttattttgtttttttttttttatttttgttttggtttgttttttgtttttttttttttatttttattttttttttttttttgtttttttttttttatttttattttttttttgttttgtttattttttgttatttttattttttttttattttgtttttttttttttattttattttttttttattttttgtttttgtttttaatttttatgtttttattattttttgtttttttttttttattttgattttttattttattttgtgtttttttttttatttttttttattgtttttttttttggttttttattttgtttttttttttgtatgtttattttttttttattttgtttttttttttttatgtttattttttttttattttgtttttttttttttatgtttattttttttttattttgtttttttttttttatgtttattttttttttattttgtttttttttttttatttttaattttttttttgttttttttttttatttttattttttttttttttttatttttatttgttttttatttttagttttttttgttttttaatttttttttttttttttttttttttttgttttttttttttttgtttttttttttattgttttttttttattgttttttttttttttagtttttgaaaataagttttttttgattttttgggtgattttattggattttgtgagattttgttttggaaggattgagaaatggggattggttagattaggttgtttagttttttggtttttattgttgttttttttgttttatgtagtggttagggtgtttagttgagttattgttttgttttttttttttagt

SEQ ID NO: 340 - DNA, 3683 bp, Artificial Sequence
  chemically treated genomic DNA (Homo sapiens)
gttggaaggaaagaatgagataatggtttagttaagtgttttagttgttgtgtggggtggggggggtggtggtgggggttggggggttgggtagtttggtttgattaatttttgttttttagtttttttagggtaaaattttatgagatttagtgaggttgtttagagagttgagaggggtttgtttttaaagattgggaggaggaggggtagtgggggaggggtagtggggggaggagtagaggagaagggagtaggaggaggggaaaaggggagaggaagttggagagtagaggaggttgggggtggggagtagatgggggtggggaaggaggggagatgggggtggggaaggggggtgggaggagggttaggaatgggggaaggaagatagggtgggggaggggtgggtatgggggaaggaagatagggtgggggaggggtgggtatggggaaagggagatagggtgggggaggggtgggtatgggggaagggagatagggtgggggaggggtgggtatgtgggaagggagatagggtggggaattgagaagaaagatagtggggggggatggaggaaggaatatagggtggggtggggggttgggatgggggaagggaaataaagagtggtggaggtgtggggattaggaatggagatagagggtgggggaggggtggggtgggggaagggagatagggtgggggaggggtgaggatggtggaaggtagataaggtgggggaggggtggggatgggggaagggagatagaagggggggaggggtggggatgggggaagggagatagaaggtgggttagggtgggaatgggggaagggaaatagggtgggggtggggatgagagaagatagaggttgggggaggggtggggatgtgtaagaaaaataaagggttggggagggggagggaaaagaggtagagagtgggggagggggtggggatgtggaaagaaagttagaaggtggggggtgaggggtggggatgggtgaatatgtgatggttgtggttttttttattagatagtagggtgggggtagggtggaaaaagggggtgtggtgggtgaatggggaggtggggggttgattgggagtgtgggatggggtgttttgggattatggagatgtttaagtttggattttgttttgggtttgtgtttttggtgattttttttttttttagtgggatgtggggtgtaggggttggttttaggttttttgagtttaagttttgttttattttgttttgtaagtttagaaaagatgtttttgtttttggttgggtaatttttggatttatttattgtttgtaattttttgggttgaagagattattttttgggagttaattaatttattttttggagtgtgtgtttttttttgtttttaggagttggttttttaaaattttttgaggtttgtgtatgttttttttgattttttgtgtttttattttttatagaaatttatgtatttatgtttttttttttttttgagtttgtagaggattttgttttgttttttttatatttagggttgttttttttgttgttaatataaatttgttgataggttatgtttgggaagtgggtggggtgttttggagtggtgttgaggtgttgtaggtttggtttttggttgtgggggagttgtattttgaagttttgttggaatttgtgtttggggttagtagggggtattagagttaatagggattgtatgtaaaatttatttttttttaggttttttagggggatggttaggtttttgtagagatggggaggatttttttttggtaaggggagagggatgggttaggagttaagtggaaggattttgtgtttaaggttttttaagggatgggataggtgaggaatttttttgagttttttgaattgttttattagttaggtttgggaagtattttgtttttataaattttgtttttttgaaaggggttgggggggggattttaatattttttgttataggttatgatgggtatggtggttaagagtaataggttgtgtggtgaggttggttttttgtggttttgttttgttattttttgaggtatttttatgttagtgaatagagttgtgggtttttagttgtatagatgaatgtatgaataaaatataggtttatataaaggaagttattgtattgatttagatttgatttgggattgttgtataaaatagggttgataaaaattgttgtgtttttattttggaaatagagatttagtttttttttttttgtttgaggtatttagtaaaggtttgtttttgagtggttgtggatgtttaaggatttatgatttttgattttataaagtttagggtgaaaataaaaaataaaataaggagattattgttttaaagtggttgttgtagttaattattttaagaaagtaaataggttggtattgaaagttatataggtgggtggttttttgggagggttgtttagttttttttttttgagatttgagtagggagtagttagaggagtttgaagggatggtgtttagggtatgggaataggttgtatatatttttatggagtatggtgtttgtttagtttgagaagggaaagaaatgggagtagagggttgatgagaaggtagtagatggatagtgtgggattgaaaaggggatttatttgaagattggttattattatttatttttattatttgattgttgttgttttattgagattgatgtgtggagaataagttggggagtggaataaatggtagggaggggagagaagtgagtgaatatgattttggtttagttttataggatagagtgtggttatgaagtttatagaggaggataggtagggaggaattatggtatggttaggttgtagggtaagaggtagagaggagagaggattgtggaggatgtttgtggagtgttgattgttagttgaggttggttttttatttatttattttttttttttgagatggagttttgtttttgtttaggttggagtgtagtggtgtgattttggtttattgtaagttttgttttttgggtttatgttatttttttgttttagttttttaagtattgggattataggtgtttgttattatgtttggttaatttttttgtttttaatagagatagggttttatgtgttagttaggatggttttgattttttgaatttatgatttgtttattttggttttttaaagtgttgggattgtaggtattagttattgtgtttggttaaggttggtttttttttttatggtgatgggtgtttgaaagttgtatatattaaaataaatttattatttgttgatttaaagtaaaattttgagggtatgaaagggaagggtttatgtttatatggttgagataaaagttgttttaggaagttgggtgtggtggtttatttttgtaattttagtattttgggaggttaaggttggaggattttttgaggttaggaattgaagattagtttgagtgatatagtaagattttatttatatttttaaaaagggttggttgttttgggattttttgaaatagttttgtaagatatttttgttttggaattataataatttagataagatgtttttgaaagaatatttgtttaggtatagtgtttttattaatgaattgatgtt

SEQ ID NO: 341 - DNA, 4110 bp, Artificial Sequence
  chemically treated genomic DNA (Homo sapiens)
tagttttattttttaagggaaatgaaaaaataataaatttttagattggtgttgatgtttattttttttaagtgggttgattatttgttttgtagatttttgatgggtggggtgtggggtaggagtgtgatttaatttttagtatttttgaattagtttttttatggtgataggttagtttaattggggttgtaaatagatttgataggtttgttttgggttgatggttattgattaggtttttagattagataagttatttggttgagtttatagtaggtggggtgtgtttattagtttaggggtagtgattggatgtttgttgtaatattggagaatgtatgttttgggttgtagtaggagatatttttaagtatagaattaaaagggtttattttaagtggtagggtattagtgatggagaggtttgagagttttagtgtttagtttttttttttatgtttgggaaggtgtagaataggttgatgtagagtaaggagtgagttttaggttttagttttttggtttgtttttagggtagtaggtgaggagtggtattagtttggggattttttttttgtgttttgtaagaattggtggtagttagtaggtggggaggtgggggtatgtgtttggatgtgggtgtttgtgtaattagttttttaagtgttagttttgatagtgtttttttgggaggttggtttgagtttttgtttttgttgtggtgtaggaagggttggggttttgttgtttgtattaggtaagagtattttgagtaaaggaagaagatgatttgtttttggagttattattggggagtgggaatttggaaagttttttaattagggatatatgtgattttttttggaaagtagttttgattgtggtttgtgtatttttttatttttttttgaatttttttaggtttttttgttttgtttatttgttgggttgtagttttttattgttttgtattttttatttaatttggtaattttaaatgtgtatggtttggttggggtgtgtggagtttggttttgggtgatttattttgttgggtttttatggtggttaagggggggtggggttaggtggtttttgagaattgagtttgattttgatgttgtgaattgatttggagtttgaggggaaagatgtttgatttttttgggggtattggagtgggtgtaggagaggtttgtggggtgtgttttatttatagggatttttttttagtttatttagataggtgttttttgggtttttgaaatttaatggttatgtgtttatgtttagtatgtttggttgagagtttttatttttagggtaaatgagttgagttattggggaagtgagaggtggggtgttgtaagggagttggatgaggtgatatatgttggtgatataatagtaggttgttttttgtgttaagattgatattatgaggatatagatttgggggaagggggaatttttaggtaaaggttgttatagttaaatttttgtgaatgattgtgatttgatagtggtgtaaaaggaaagagtgaatgtagtttatgttgtggaaatttaggggtagaggtaaggggggagggtattttttttgtagggattgtttttgtatttttttttatattgagtagtgtggttatttggttttttttatttgtgtataggtaattttagatttgagttagtgatattgtttaatgtatttattttagtttttattattagttttttatttttgttttataatagtttattttgtttttggttgggtttttgggtagaggttgaggtttagtttgttatttttgttttgtgttgttgtaaaagttgtagtaagtgtagttgtaggttggtggttgggaattggtttgagtaagttttaggtagttatattgggtatgtttagtagagtttgtggtttggggattttgtgtttgtatttagagttattgttttgtttttttttattgttttttgttttgttttgttttttttttgtttggtgtggttttgtttgttttttgtttgttttttgtttttttttggttttttgaggtgtttgggtttttggtgtggtggtggagggggtgggtaggttggtgggtggtgatgtggtgggattttttatgtgttgtggtaggatatgtgtttggtgttgggatgtgattgtgtttagttttttttttttggaagttgtagttatgatggaagtttgagagttgagttgttgtgaggtgaggttgggtttaggtgagggagatgagagatggtggtggttgtggtttggagttttttttagtgtttgtgagtagttgtgggggtagtgtttttggggagttggttggtttgtggtggtggtagtggtggtgttttttgttttttttttgttttttttaattgtgtagttttttttttggttttttttgaaagggaaggtggaagttgtgggtttgggtgggagttggttgaggtgtggtggtggtggtggtattttttgtttttggagtgggggggagaagtggtggtggtggtggttgtggtggttgtagttttagggagggggtttgagttgtttgttattatttttagggttgggaatgttggagagttggtttttttttttttattgtttttaatatggtggtggtggtggtggtatatttagggatttgggttggttttaaattttttgtttgttgttgttgtattttttgtggtttgggttttggaggttgttggtggaggtagttgtttggaggattatttgttttttttttattttgttgttgttgttgttaggtttttggttgttgaggagaagtaggtttagttgttgtaattatttagtagttgttgtagtagttattatttggttgtggtttagagttaagtggtggtagagtgaggggtattagttattgttaagtttagagttatttttattttgtagaagaagttttgttattagtagtttttgttatttttttttttttttttttttagttataggtttttagatatgatagttattattaaagagattgttagtagaaataaaaggagatattaagaggatggatttgatttagatttgatttgtatttatttttgtggttgtttttttttatttttttgttatttttttagaatgtgggagtagatggatgtgaaaatgtttgtagtttgggtgattataatatttaattttggttaggttgttaggttatatattttgtgttttttttttgtgtatttaatttagggtgtgtttggttagatggaatttttgtttggttgtaagtgttaagttattgattgtttttttaggttatttatatggtttttttttgagggttattgtttgttaatatagaatatagtatattgttagtggattagtgagtttggtaatttggttttttaaatgaataaaaaagtagatgttttttgaggttgagtatattttgattaaattttggtttaggttttagattaagggtttagattagaataaaatgaaaattagtgttgtatgtatgtatattgtattagaattttgtagtgattgttttagttttttgagttgtattgatagatttttttaaaatatgattgatttgtataattttagaagtagaattatttttagtatatatggtgtatattgagggtaaaaagtagttttgttaatgtttaaatttaagttatttataattttgaattgtatgtagaagttttgtagtttgaagttaatagtgttataatatattttataaggtgtttttattagatttttgttatatttatttttttttttttttatggggtgatgtaggatagtgtttgaaatttgtattttagtagtatttaatgtttagtgtttttgttataaatatagaatggatattgagtagtttttgattttagatggtaatgtgtaggtttaagggtattgtgtgtagtaagtgaagattgtagaaataaaattttagtttatgtttgaaatttaagtattgttgtgatgttagaattgttgtttattgtttttaggttttaggttttttgatattttttggtattgttaattttattgatttg

SEQ ID NO: 342 - DNA, 4110 bp, Artificial Sequence
  chemically treated genomic DNA (Homo sapiens)
taaattagtaaaattaatgatattaaaaggtgttagaggatttgaaatttaaaaatggtgagtagtaattttggtattataataatatttaaattttaagtatgaattgaagttttatttttgtaatttttatttgttatatataatatttttgaatttatatattattatttgggattagaaattatttaatatttattttatgtttatgataagagtattgaatattaaatgttattgaagtgtaaattttaagtattattttatattattttatagggagagaaaaaggtaaatataataaagatttagtaagaatgttttataaggtatattatggtattattgattttaaattataaaatttttatatatagtttaaagttgtaggtaatttaagtttaaatattaataaaattattttttgtttttaatgtgtattatatatattgaaaatgattttgtttttaaagttatgtaaattagttatattttaaaagaatttattaatgtaatttaggaaattaaaataattattgtaagattttgatgtaatatgtgtatgtgtaatattaatttttattttattttgatttaaatttttgatttagggtttaagttaagatttaattgaaatatgtttaattttaaaaagtgtttatttttttgtttatttaggagattggattattgagtttgttaatttattaatagtgtattgtattttgtattaatggataatagtttttaggaagagattatatagatagtttaagaaagtaattggtggtttgatatttgtaattaggtaagagttttgtttagttaaatatattttaggttgaatatatagaaaggaaatataaaatatatgatttagtaatttgattagggttaaatgttatagttatttaaattatggatatttttgtatttgtttatttttatgttttaagagagtgatagaaaggtaaagaggagtagttgtagaaatggatataggttaagtttaagttgaatttatttttttgatatttttttttgtttttgttaatgatttttttgatgatggttgttatgtttgggagtttgtggttgaagaaaaaggaggagagagatggtagaagttgttggtggtggggttttttttgtaggatggaaatggttttggatttggtggtagttgatgttttttgttttgttgttgtttggttttggattgtagttgggtaatggttgttgtggtggttgttggatggttgtagtgattgggtttgtttttttttagtagttagaggtttggtagtggtggtagtggaatggggagaagatgaataattttttgaatggttgtttttgttggtggtttttggagtttgggttatggggggtgtggtggtggtggatgggaggtttaaaattggtttgggtttttggatgtgttgttgttgttgttgttgtgttggaggtagtagaaggggagagattaattttttggtgtttttagttttggaaatggtgataggtgatttagattttttttttggagttgtagttgttgtggttgttgttgttgttgttttttttttttgttttaggagtgggaggtgttgttgttgttgttgtgttttagttggtttttgtttgagtttatggtttttatttttttttttaggagaagttgaggaagaggttgtatggttagaaaagatgaagaggaggtgagaaatgttgttgttgttgttgttgtaggttggttggttttttgagggtgttgtttttgtggttgtttataggtgttgagaggggttttgggttgtggttgttgttgttttttattttttttgtttgagtttggttttgttttatagtggtttaatttttaaatttttattatggttgtagtttttgagaggagagaattgagtgtagttgtgttttagtgttgagtgtgtattttgttgtagtgtataaagagttttgttatattattgtttgttggtttgtttgttttttttgttgttgtgttgggagtttgggtgttttggaagattgaggggaggtgggaggtgagtgagaggtggatgggattgtgttgggtgaggggagggtagggtagggtagggggtggtaggagggggtagagtggtagttttgggtgtgagtgtagagtttttaagttgtaggttttattgagtatgtttagtgtagttgtttggggtttgtttgggttggtttttagttgttagtttgtagttgtatttgttgtggtttttgtagtaatgtgaggtgaggataatgagttaagttttggtttttgtttagaaatttagttggaggtagggtaggttgttgtggggtgggggtggaggattgatgatgaaagttgagatgggtgtgttgagtagtgttattgatttgagtttgaggttatttgtgtataggtgaaaaggattaggtgattatgttgtttagtgtagagggaaatgtagggatggtttttgtaaggggaatattttttttttttgtttttatttttagatttttgtggtgtggattgtatttgttttttttttttgtattgttgttggattataattgtttgtagagatttgattgtaatagtttttgtttagagattttttttttttttaaatttgtgtttttatggtgttagttttagtataaagagtaatttgttattgtgttgttagtgtgtattattttatttggtttttttgtagtgttttattttttgtttttttggtaatttggtttgtttgttttaaaaatgaaagtttttagttgagtgtgttgaatgtgaatatatagttgttgaattttaagggtttaaagggtatttatttaaatgaattgaaagaggatttttgtgagtgggatgtattttgtaggttttttttgtgtttgttttggtgtttttaagagagttgagtatttttttttttgggttttaggttggtttgtggtgttggagttaagtttggtttttagagattatttagttttgtttttttttggttgttgtgaaaatttggtaggatggattgtttggggttaggttttgtgtgttttggttggattgtgtatgtttggggttattgggttgagtggaaagtatggaatggtaggaagttgtagtttagtgagtgggtggggtgaggagatttaggagggtttaaaaggaggtggaaggatatatgggttatagttggaattattttttgaaggaggttatgtgtgtttttagttggggaattttttaaatttttattttttagtgatagttttggaggtaagttgttttttttttttgtttggggtgtttttgtttggtgtaggtagtggaattttaattttttttgtgttgtggtggaaataggggtttggattagttttttgaaggagtgttgttggggttggtgtttggggaattggttatataagtatttatatttaaatatgtgtttttgtttttttgtttgttggttgttgttgatttttatagaatgtggggagagagtttttaaattggtgttattttttgtttgttattttaagagtaagttaaaggattgagatttgagatttattttttgttttatattgatttattttgtgtttttttaaatgtgggaaaaggagttgggtgttagggtttttgggtttttttattgttgatgttttgttgtttagggtgaatttttttggttttgtgtttgagggtattttttgttgtagtttagagtgtgtattttttgatgttgtaataaatgtttagttattatttttgagttggtgagtgtgttttatttattgtggatttagttaagtgatttatttggtttgagaatttagttaatggttgttagtttagaataaatttgttaagtttgtttatagttttgattgggttgatttgttattgtgagagagttgatttggaaatgttgagagttggattgtatttttattttgtattttatttgttaaggatttataaagtaagtagttgatttgtttaaagagaatgagtattaatattagtttgggaatttattgtttttttattttttttaggaagtagaatta

SEQ ID NO: 343 - DNA, 5507 bp, Artificial Sequence
  chemically treated genomic DNA (Homo sapiens)
aaataagtgaaaattttagtttagtttaggttagttttagggttggttaaattagaggtttatttataatattgaggatttagatttttttgaaattttttttgtattaatattagtatttttattttttttgtaggttggtttgttttatgttataatggttgtagtaattagaagtgttatatttttagtaatatttaatattattattattatttaataatatttagaattgtgttatttttgttttaatttattaggtttttagtagattattttttattttttaaatgttaaaattgtattttgagtttttgtttaaattaatttggggtgaggtgaatggaagtagtattttaattgtatttattttttgtagttggatttgggtttgggttttattttttgatatttgtttataagaaagatttttgaagttaggtaggattggttgttgagtaggttagtgtttgttaaatttttatatatttttatatatgttataatatgtagataaaaagataattttttatataatttgttgggataaatttaggaggtttatagttatgatttgtttgaaggttttttttgttttagattttgtttagttgttttaggatgaggggatttatattatagtataattgtattttatttatagtataaattattttttttttttttagttgatgagtttagatgggtaataatagtgtttgttaaagagaaaaaaaaatgtatttaaattagataatttattggtataaatattgagatatagaagtgataatagttttaagttaatgtttgatggtggtagttttagtaagtttttttttgatgtttttgtgtttttgtatatgttttttttttgttattgttttttttattaaatataatataatggataagtggaattaaatagaattgagtttaaattttttgttatttattggttttggtattggataaattaatttttttgagtttgtttttttatttgtaatgtagattagttaatattatttattggaaagtgttgttttttagttaatgtatgtaaggtttaaaatttagatgatgggttgataggtgtagtaaatttttatggtatatgtatgtttatgtaataaatttatatgttttgtatttgtattttggaatttaaagtaaaaaaaaaaaaaaaaaaagaaaagaaagaaagaaaaagaaaaaaaaggttgtttttggggattaaataagataattatgtaaggtggttagtatagtttttggtatatagtaaatgttaggtttgtttgatagatttttatttagtagttattgtttttttgaaaattttttttagatgtttttatggtgttttttgtttttatattattataattttttattatattattatttgtttattttttatagttttttttttttttttttttaattagtgattttaaaaggttagtaagtgtttaatattttttattttttaagtgattggtaaagttttgtatttattagtgttttaagtttgtttttgttttggttgattttgtaaaatggattgggtgggatgagaggtggggggtgttgtttaaggagggagagtggtgtttttgttgagggtgtattagttagatattttttgtggggtttgagagttttttttattagattttgggatagggatgaggtttatagttatttattagattttttgtatagttttgttaagtgtattttggtttggagggggtggttttgggtagaagtatgtttgggttgtgttggatgttttttggaaggtgtttggatttatgttaggttttttagtttaattttttatgatttagtgttttagtttgtgtattgattagtgttttagttttttatagatgttggtgggtttgggagttttgtggatgtgatgttgtgggtggaagtgatgtttttttgtggttggatgtggtgtttagttgttgggtgggggagggtgtgtttggttttttttaggggatgttgaaattatttttgtaatgggagttgggagaggatggggtgtgttttgatgtgtgtgtgtgttgttttttttggtgtttttttatagtttgttggtttttgttgtggaaaggtgttatgttgtttaaaattttttgaaaaatggttgttattgttgttgttgttgttgtggaatttttggtattgttgttgttgtttttttttgaggaggatttagagtaggatagtggtttggaggatttgttttttgttaggtgagtgagtagagttgttgttgttttatgtgggaagggtgttttgggtgtgtgtagggtgggtgttaaggtggtttggtggggatttgtttttgttaggggttgggttttggtgggaggaggtgttttttttgttttttgttatggtggagtgtttgtagaatggtgataggattttgggtttttgggtgaggggttttggttttaatttgataggtgttgggtgggtggggttagggttttgagtgaagtgataggtgtagtttttttttgtgaggtttggaggtagagggttgttgtgagtgtttattagatgtaaaaaatgaaaaataaaaatataaaaatggtgtttgtgggagagttttttattggagaattggagtattttggtggttgtttgattttttgttttggtttatgtgatgtaatagttgggaagtatttttttttgggtgtgtattgtatttgaagtttatttgtgggagaggttgattagaaagttttggataagaagtgtagggttttgagtgtttattgtttataggatatttggtttaggagttttgtggtgtttttttagaataataatgtattgaggttttggggatttaaagttatttgtagtgattgatggagtgtaattttttagaggaattgaaatatgggtaaaatttttatgagatatttattagaagtgtttgaaagtttttaaattttttttttttttgtttgatgaattttttttgtgtgttagttggttttggtttgttttattattttttttattttgttttttgattttgaattagtaaggattttggtgttttttttttttgtttttgtttttggtataaaattagtggttttgtgtgtaaatggaaatttttgtttttttttattaagtggaatttaaatttaagtaagtttatatgaatgtattagattttgaagggaagtatttattgtattataatattttattttttttgatttttttattttatggttaaatagttatgattgaaagagtgtaattgttattattgttagtattggttttattttgagataagtttattgtagagggaatgggatttgtttttgttttttattatttttttttttatttttgtttattattaaatttttttatttttatttatttttttttatttggtatatattaataatttatggtagaaaagattgaagtgggatttaggaaatggtttttggaaggttattaaaaatttatatatttaaatggattgttttataggttagttaaaaattatatttgttaaaaaattaaaataataataataaaaaattaaaaattatgtttggggtatgttttgggaaaagatatggttttagtttttgattaaattttgatgtatttaatttttgtaaattttttttgggaaaatgtagtaatggttattttaaagaattttatgttatgtatatagttttggaagtatattttaatgtagggtaattaggaatattgatgttgtggttattgtttggaaaaaagaggattgttttttttattttttaatttattttatatattttaagtaatggaattataaaaaatttttttataagttaaaattatataagatatagtttgtttttgattatttatatttataaagggttttattaatatagatagttgaattttataaattaattagtaagggtagaattgttgttgtgtagtttgatattgagtattttgtttggagatggaattaaggtttagtttaattgtatttttagtgatagattttatttttgatttgagagtttagattttatttttgttgttttatttttggtttaagtaatgtagttggaagggaaattgttattaggaatagtatattatatttattgttgaaataattaaaggttaattatgttttgagttgggtgtgatggtgtgtatttgtagtttatgttatttaggaggttgaggtaggaggattatatgagtttgggagttggaggttagtttgggtaataaagtaagattttagtttttaaaaaaataaaaaagttgattaggtatgttggtttatgtttgtaatgttagtattttgggaggttaagatgggaagattgtttgaggttaggagtttgagaggagtttgggtaataaaataagattttgtttttaaaataaattttaaaaaattagttagtggttgtggtatatttgtaggtttatttatttaggaggttgaggtgggaggattttttgagtttaggagtttgagattgtagtgagttatgattttattattgtattttagtttggatgatagagtgaaattttattttaaaataagaaaaaaaaataaaaattaattatgttttgaaggaggaattggtagtttagaatagtggttaagggtatggattatagagttagattgttgggtttatatagtggtttattttttattggttgagattttaggtaagttttttaatttttttaatttgatagatatttgtaaatgtttatttttatagatgagaatatttatttaaaagggttgatgttgggatttagtgaaattatatgtttaaggtattttttataggattatagtaaatatttaaaaattattaattattttttatattatttttattagtagataatatatagaaattagatgaatgaaaatgaattagttaataagaatttattaaatgtttgtttttgttaaggggaaaggataaaaataagtagttgtattatgtaagatgtgttagtaggtagagagatatatgaaatattgataagagaagattatagtttaataaagttattggtgttgaattgtataatattatttatgggtttttatttttttgttgttatttttattttatttttttaaatagttttagttattatatttatttttttttatagaagtgttttgttgttttgaagtatatttgatttattatgtaagtaaatattttttattgtgtggtatttttattttggaatgattatgaaaaagataattatatgtttaaatttgaagtgtaatgtttttttaagataaaataagattttaaagtatttaataatgtttttttttatagtagtgttatgtgtaaattattgaaataagtatgtattgaattaatttgatttataagtatatgttaattatatgattatttttatttggtagg

SEQ ID NO: 344 - DNA, 5507 bp, Artificial Sequence
  chemically treated genomic DNA (Homo sapiens)
tttattaaatgaaaataattatataattggtatatatttataaattaaattgatttagtatatatttgttttaatagtttgtatataatattattgtgaaaaagaatattattaaatattttaagattttattttattttagaaaaatattatattttaaatttaaatatatgattattttttttatggttattttaaaataaggatattatatagtgaaaaatatttgtttgtatggtaagttaaatatattttaaagtagtaaaatatttttgtgaaggaaagtaaatgtaatagttaaagttgtttgggaaaataggataaagataataataaaaagataaaaatttatagataatattatataatttaatgttagtgattttgttaaattgtagtttttttttattaatgttttatatatttttttatttattagtatattttatatgatgtgattgtttatttttgttttttttttttaataaagataagtatttaataaatttttgttggttaatttatttttatttatttaatttttatgtgttatttattaataagaatagtatgaagaataattaataatttttgagtatttattatgattttgtagaaagtattttaaatatatggttttattgaattttgatattagtttttttagataagtatttttatttgtaaaagtagatatttatagatgtttgttaaattggagaagttaaagaatttatttgaggttttagttggtaagaggtaaattattatgtgagtttaatagtttaattttataatttatgtttttgattattattttagattgttaattttttttttaaaatataattagtttttgttttttttttttgttttgaaatagggttttattttgttatttaggttggggtgtagtggtgaaattatggtttattgtagttttaaatttttgggtttaagggatttttttattttagttttttgagtagatgagtttataggtgtgttatagttattggttaattttttaaaatttgttttagagatagggttttgttttgttgtttaggttttttttaaatttttggttttaagtaatttttttattttggttttttaaagtgttggtattataggtgtgagttaatatgtttggttagtttttttgtttttttaaagattggggttttgttttgttgtttaggttggtttttaatttttaagtttatgtgatttttttgttttagttttttgagtagtatggattataggtatgtgttattatatttagtttgaaatatgattaatttttgattattttaataatgaatgtggtatgttgtttttagtgatagttttttttttagttatattatttaggttagagataaggtaatagaaataagatttaaatttttaaattaggaatggaatttgttattggaggtgtagttggattgagttttgattttatttttaggtaagatgtttagtattagattgtatggtagtggttttatttttgttggttaatttatagagtttaattgtttatgttaatgaaattttttgtgggtatggataattaagaatagattgtattttgtatggttttgatttataagagaattttttatagttttattatttaaaatatataaaatgagttaaaaaatgaaagaaatagtttttttttttttaagtagtggttataatgttaatatttttggttattttatattagagtatgtttttaaagttgtgtgtataatatggaattttttagagtagttattattgtatttttttaagggaaatttgtaagaattggatatattagaatttaattagaaattaaagttatgtttttttttagaatatgttttagatgtggtttttaattttttgttgttgttattttggttttttaatgaatatggtttttaattgatttataagatagtttatttaaatatataaatttttaatagttttttaggggttattttttaaattttattttaattttttttgttgtgaattgttagtgtatattgagtggaaagaaatgggtgagggtgaaaggatttggtgatagataagaatgggagagaaaatagtgaaaaatagaaataagttttattttttttgtaatgaatttgttttaaagtagaattagtgttgataataatgataattatatttttttaattatagttatttaattataaagtagaaaaattaagaaaagtaagatgttgtaatataataaatatttttttttaagatttagtgtatttgtatggatttgtttaaatttagattttatttaataagggaaaatgaaaatttttatttgtgtatagaattattaattttgtgttaaaaataaaggtaaaaagaggggatattaagatttttgttggtttaaagttaaaaggtaaaatggaagaaataatgagataagttgaagttgattaatatgtaagaagagtttattaaataggaaaaaaaaaagtttagaaatttttaagtatttttggtaaatgttttatgaaagttttgtttatgttttagtttttttaaagagttatgttttattaattattatagatggttttgagtttttaaggttttgatgtattattgttttaaggaaatgttgtaaagtttttgagttgagtattttgtgggtaatggatatttaggattttgtgttttttgtttaaggttttttggttggttttttttataaatggattttagatgtagtgtatgtttggaagaaaatattttttaattgttgtattgtgtgaattaaaatagaaagttagatgattattggagtattttaattttttggtgaaaaatttttttatagatattatttttgtatttttattttttattttttgtgtttgatggatgtttgtaatgattttttgtttttgagttttataagagggaattgtatttgttattttgtttaggattttagttttatttgtttgatatttgttaagttgaagttgagattttttgtttaagaatttagaattttgttattattttgtagatgttttgttgtggtggggggtagggagggtgtttttttttgttgggatttggtttttggtgaggatggatttttgttgagttgttttggtgtttgttttatgtatatttggggtgttttttttgtgtgaggtgatggtggttttgtttgtttatttgatgagaggtaggttttttgggttgttgttttgttttgggttttttttaggagggggtggtggtggtggtgttgggggttttgtggtggtagtggtggtggtggtggttgttttttggggggttttgggtggtatgatgtttttttgtggtgggagttagtgagttgtggaggagtgttggggaggatgatgtgtgtgtatgttggggtatgttttgtttttttttgatttttgttataaaaataattttaatgttttttgagaaaaattggatgtgtttttttttgtttggtaattgagtgttgtgtttaattgtgggaaaatgttatttttgtttgtggtgttatgtttgtgaggtttttgggtttgttggtgtttgtggggaattggggtgttggttggtgtgtgggttgggatgttaagttatgaggaattaaattgggaaatttggtgtgggtttaggtgttttttaggaggtatttggtgtggtttggatgtgtttttatttagaattattttttttaggttggggtgtatttaatggggttatataaagagtttggtgggtgattgtgggttttatttttattttggggtttgatagggaagatttttgggttttgtagggaatatttggttagtgtatttttggtgggagtgttattttttttttttgggtggtgttttttattttttattttgtttaatttgttttgtaaagttggttaaaataaaaataaatttggagtgttgataggtgtggaattttattagttatttagaagatagaaaatgttagatatttgttggttttttgggattattggttagggaaaggaagggagggagttgtggggaatgaatggatagtagtgtaataaaggattgtagtggtgtaagaatgggaagtattgtggaaatgtttgaggaagatttttaggggagtagtagttgttgaatagaagtttgttaggtaggtttgatatttattatgtattaggaattgtgttggttattttatataattgttttatttaatttttagaaatagtttttttttttttttttttttttttttttttttttttttttttttttttattttaagttttgggatataagtgtagaatgtgtaggtttgttatataggtatatgtatgttatggaggtttgttgtatttattaatttgttatttaggttttaagttttgtatgtattagttaagaaataatgttttttaatgggtagtattagttagtttatgttgtagatgaggaaataggtttagaggagttaatttgtttaatattagggttgatgggtagtagagaatttgaatttaattttatttgattttatttgtttattatattatgtttgatgaagaaaatagtgatagagaaggagtatgtgtaaaggtataaagatattagaaaagagtttgttgggattattattattaaatattggtttaaagttgttattatttttgtgttttggtatttgtattaatagattatttagtttgaatatatttttttttttttttggtagatattgttattgtttatttgaatttgttaattgagaaggaaagagatggtttatgttgtgaataaaatatagttgtgttgtgatgtaaatttttttattttggagtagttgagtaaggtttaaggtaggaagaatttttaagtaggttatggttgtaagttttttgagtttattttagtaagttgtataagggattatttttttatttgtatattatgatatatgtgaggatgtgtaaaggtttggtaagtattggtttatttaatagttagttttatttaattttagaaattttttttgtgggtaaatgttaggagatagggtttaggtttaggtttagttataaagaatgaatataattaaagtgttatttttatttattttattttagattagtttaggtaagagtttaggatgtagttttgatatttgaaagataaggagtagtttgttgggagtttgataaattgaaatagggatggtatagttttaaatattattaaataatagtaataatattaagtattattgaggatgtgatatttttgattgttgtagttattgtaatgtgaggtaagttaatttatagagaaggtagaaatgttgatattggtgtaggaggaattttaaaagaatttggatttttagtgttataaatgagtttttgatttggttagttttggagttgatttaagttgagttgaggtttttatttgttt

SEQ ID NO: 345 - DNA, 6289 bp, Artificial Sequence
  chemically treated genomic DNA (Homo sapiens)
tttttgtttttgttttatagttattttgagatttattatttagttaattttaaaagtattgttgattattgtgaattttattaaggtttttttaagagggttttattgttttaaaattgtttttgaaatattttgttatttgtttatttgatttttttttatttttagagttttattttttgtttttttgtttgttattatattttttataagtttttatttttgttttagtatttttttttttgttagtttatatattttattaagtaaaataaaaatagtaaaatagtaatgttttttgaatttttaaattgtttaatttttagattgttttttaatttggaaaatgttttatattaagtttatttataaattaaggattggtaatttaaaaaattaaaataaagaaaggagaattggaaataaaatgaattggttgggtatggtggtttatgtttgtaattttagaattttgggaggttgaggtgggtggattatttgaggttaggagtttgagattagtttggttaatatggtgaaattttgtttgtattgaaaatataaaaattagttgggtgtggtggtgtatatttgtaattttagatatttaggaggttgaggtaggagaattgtttgaatttaggaggtggaggttgtagtgagttgagattgtgttattatattttagtttgggtaatagagttagattttgttttaaaaaaaaaaaaaaagtttaatttatgtagagttagttgaatggtagataggagtttggttatttaaattagtttattagaaaatttggagattggggtttttaaagaatgatttggtgggtagggggttagggattggtgaatgttaatttgttaggtgggaggtgaaattatagggggttgaagtgggtttttgttgttttttgttattgagtggaattgtagaatttgttgagttagattatggtttgagtggtgttagttagtgtattggaatgtgtggtttgaaaagtatttttagtattaattttaggttttataatagtgatgttatttttgagagtaattggggaggttaggaattttatagtttttggttgtaagttttttaaattataatttttaattttgtggttaatttgttagttttataaaggtagattgatttttaggtaagaatggggtttgtttttggaaaggattgttataatttttgttttaaagtgaaattagaaattaaattttttttgtagttagttaggtttttgtttaggaatgaataagggtagtttggaagtgagaagtgtggagttatttaggttagattttttgtattgttataatttttttattgttaggatttttgtaaaggtagttttgtgaatgtatagagataggtttttgttattatttttattttttagataaggatatttaggtgatgaggaagttttatttttgggaatagtttggatatgaaatttttatatgttagtgttttttggatatttttttgttagtatagttttgttgaatgtttttatggtggggaggtatgtgtttaaaatgtggggaaggtgtttttattttatttttggtgaaattaggggagttaatttttttaaatatgatttttggtttttttgaattgttggtttggattatgttttttagtagtttgtgtttaagattatgggtgtttgtaggtggttagtgttgtttgtggtggtgtaggtgtggtgtgggtggtggatgggtgggtgttttgttgtttgaatggttgtgggtttgggtttttattttatttgaggtttggttgtttaggggtgtgttatgttgttgggaggtgattagttgttattgtttttgtttttttttttggtggtggtagttttggatgaggaggaggaggatgatggtgaggtggaagatgttgtgttgtttgttgagttgtttattttttagatttagtagtggtttgatgagttgtgtagttgttttaatatggatgaggtggtgtgggttgaggtttgggatagttattgtagtatgagtgaaagttatatgttggaggtgtgtttgtgggtggaggggtgtttttggtttagttggtgtgaattggtgttttttgagttgtgttgtgtgttttgagagatttttgggtgggttgtgggtttttagttttgagaggggtggggattttttttgtgttattttgaggtttttagttgttttgagggttaatttgtttttgttgtgtttttttgtggtttttgaatggggaatgtgttttgttttaaagtagtatagtaaggttgagattgtgttggggttttgttgaggaaaatgggtgtgtgtggtttatttgattttttgtttgttttgttagtagaatgaattagtgttgttgttaagattatatggataaggggaggggatttgtttttatttgtattgtgattaattgggttgtggtatttgggtttttaggtgtttttgtttgtttgtttttttttgttaattaaattgtttttgttttggtgttgtgggtgtttgagttaatgtgttgatgtgttttgggttgtgtttatgtttgtgtaaataaattaatatttatttttttttaggttagatgaaatgagttttttgttgatttggatgtagatatatgtttttatttgttattaggattaggattgtggttattttgagggttttttggttattttgggtattgtataggatttttgttgttgttgtgatttgggtgtgttaggttgtagtttttggatagggtttgtagatgagaaaaatggttattttagttagtgagtgttagttttgtatgtattttttttttatgggttaatgggaagtgatatggaagtatggattgtttattagttgtttgattgtgtgtgtggtatttaaatttgaggttatttgattttttaagttgttttataattaatttgtagaaagagttgggtaaataggtttaggatgtaaagtttaattaaggtattatttaaatatgatgtttttggttatgtgtattgatgagtgaggttatttttaatttgtatttgtattaatagaattttaatttaattattagttttttttttgaattgttaggtttgtagaagatagtgtatggtggttttagaatttgatagatttgaaattgttggaaaagtttagtatggtgatttttaaattggagatatttgtgtttattttatagagttgttttgaagattaaataaggtaataatgtagtttttggtatataaagtatttatatggatagtgtttttaagtttattaagttttttgtatatttatatgatttggttgagtaagttatgtttttatttattttttagtgtttttttgtagtttggtaaagagaaggattggttggttttttatgttgttttttgttttttgggtttttttttggtaaatggttttaaaggtttttaaataagtttttattttatttttaagataattttgtaaattagatagaataagtattattgttatttatttgaggtattttaatttatagtagttaagttgtatgaagtttagtgatatatgagtaagtattatgtaatagttggttagtaaattatttttgaaaatatgtttgattatttaatttttttgattattgagattttagttttagttttttagtttagtttatttagtaaatgatttatttagtaaaatatttattaaatattttttgagtatttattatttgttatatattgttttaggtgttggatatagagtagtaaatttgtttttgtggggtttatagtgaggtatgttgtgataatatgggatgttatttttatgggagtgtaagggaaaataaagtttttatgatgtttaatatagaatattggttatggaattttaatttgattttttgtattttttgtgtatttttaatttgtaatttatttttatagtttttagttaagaaaatgtagtttttgagattgttaagtaatttttttattgtgttatagttattgtatggtagagttggaatttgaaattagatttatttgattttagaagatgtgattatgagatgttaattttgaggataatttttttagtattatggaatttttaatatatattttttaggattaaagataaattaggtatagagtttattttttgtataaattatttaaaagagttttgtgttttattttgttatttaagtattgtaaaatttttataagattaatttttttttttaggaatgatatagttgtaaattttttattttttttttttttttttttttttttttattatttaagtagttgtgaattttttagagttaaaatagaatattatagattattttttaaattttttattgaagtagaggataatgttgtgattgatttaattttatgttttttaagagatattgatatagtagagaaatgtagtagttatgtatttaaatttgtttttatattataaattaagaatattatgaaattattttttagagatatatgtgatatatagattttggttgttttttttttttttataaaagaatatttatgttattgatatatataagtgggtttgtaagatagtttatgtgtaaatgtgaaaaaaggaagaatttttagttttttttatttttatttagattagtaatgaatatattgaagttaaaggatattttttatttttttttgtttttatagggagaggaaagttgtattattttttgagtaaaaagaattgtgatgattttttataaataatgttttaaaaattattatttttgaatgatatttggtagtggatttataatagttttatttggttatataaataaattttatgtatttatgtatgtgttttgattaggtataaaattagtggttgaatatttatttaagtttaattttgtatttttattatttttttagattttgagtaagattaaaaatataaataataggttaggtgtaggggtttatgtttgtaattttagtattttgggaggtttaggtgggtgagttatgaggttaggagattaagattattttggttaatatattgaaatttagtttttattaaaaatataaaaaattagttgagtgtggtggtgggtatttgtagttttagttatttaggaggttgaggtaggagaatggtgtgaatttgggaggtagagtttggagtgagttaagatggagttattgtattttagtttgggtgatatagtgagattttattttaaaaaaaataaaaaataaataaaaataaataataatattgtttgtattattatggttatatagtaaattgttttaaaatttaggggtagaaagtaatttgttttggttataggttttgtgagtaaggaatttaggttggggatagtgtggatgttatgtttttgtgttaaaatgattggtattttatttggaagatttgagtaattaggtattggtatagttggagtttgttgggtatttttgtatgtttgttttatgtggttttattagtatggtgatttagggtagttaaatttttatatgttggtttaggattttgaaggtatatgttttaagagagagaattaagtggaatttatattgttttgtataattttttagaattatatagttttatttttatttttgtaattattgatagagatagttaattagtgtgagggaatgtagatttttgtttaggtttaaggtgagggaattttttttattttttagtggaataatgttaatgttatattataagaagagtttatggggttgggtatagtggtttatatttgtaattttagtattttggaaggttaaggtggatggattatttgaggttaggagtttaagattagtttgggtaatatgataaaattttgtttttataaaaaatataaaaattagttaggtatggtggtgtatttttgtagttttagttatttgggaggttaaggtaggaggagtgtttgaatttgggaggtggaggttgtagtgagttaagattgtgttattgtattttagtttgggtgatagagtaagattttattttaaaaaaaaaaaaaaaaaaaaaaaaaaaaagagtgtatgagatagggttattattgaaattaagttttttataaaaatataaataatatttttaatttaaatatatttttaaaaatattgaaatatttatatgtagttttttaattaaaaattaattttttttttttttatagg

SEQ ID NO: 346 - DNA, 6289 bp, Artificial Sequence
  chemically treated genomic DNA (Homo sapiens)
tttgtaaaagaaaagaaaattgatttttagttaaaaagttatatataaatattttaatatttttaaaagtatgtttaaattgaaagtgttgtttatatttttgtgggaaatttagttttaatgatgattttattttatatgttttttttttttttttttttttttttttttttgagatggaattttgttttgttatttaggttggagtgtagtggtgtaattttggtttattgtaatttttattttttaggtttaagtattttttttattttagttttttaagtagttgggattatagaagtgtgttattatatttggttaatttttgtattttttgtagagatagggttttgttatgttgtttaggttggttttgaatttttggttttaagtgatttatttgttttggttttttaaagtgttgggattataggtgtgagttattgtatttagttttgtaggttttttttataatgtgatattaatattattttattgagaggtagagagggtttttttattttggatttgggtaagggtttgtgtttttttatattgattaattgtttttattaataattgtagaggtagaagtgaaattatgtaattttaaaagattatataaggtagtatagattttatttggtttttttttttaggatatgtgtttttggagttttgaattaatatgtaagaatttagttattttggattattatgttggtgagattatatggaataaatatatagagatgtttaatgagttttagttgtgttagtatttagttgtttaagttttttaggtgaggtattagttattttgatgtagaaatatgatatttatattgtttttagtttgaattttttatttatagaatttgtgattaaaataaattgttttttgtttttaagttttaaggtaatttgttatatagttatagtaatgtaaataatattattgtttatttttatttattttttattttttttgagatggagttttattgtgttatttaggttggagtatagtggttttattttggtttattttaagttttgttttttaggtttatattatttttttgttttagttttttgagtagttgggattataggtgtttattattatgtttagttaattttttgtatttttagtagagattgggttttaatgtgttagttaggatggttttgattttttgattttgtgatttgtttatttagattttttaaagtgttgggattataggtgtgagtttttgtgtttggtttattgtttatatttttaattttgtttaaaatttagaaaagtgatagaaatataaaattaagtttgaatggatatttagttattaattttatatttaattaaaatatatatatgaatatataaaatttatttgtataattaaatgagattattgtggatttattattagatattatttaaaaataataatttttaaggtattgtttgtaaaagattgttataattttttttatttaagaagtgatataatttttttttttttataaaagtgaggaaggatggaagatgttttttagttttaatgtatttattattggtttaaatgaaaatgagaagaattggaaattttttttttttttatatttatatatagattgttttataaatttatttatatgtattaatagtatagatgtttttttgtaaaaaaaaaaaaaatagttaagatttgtgtattatatatatttttgggagatggttttataatatttttgatttatgatgtaaaagtaaatttagatgtataattattgtatttttttattatattaatattttttagaaagtataaagttaagttggttatagtattattttttgttttaataaagggtttaaaagataatttataatgttttattttggttttagaaaatttataattatttggatggtggagggagaaaaaaaaaaagaaaaaaaatagaaagtttataattatattgtttttaaaaagaagaattagttttgtgagaattttatagtgtttagatgataaaatggagtgtgaagtttttttaaataatttatgtaaagagtagattttgtgtttagtttatttttggttttaaaaaatatatgttgaaaattttataatattaaaaaagttatttttaaaattaatattttatggttatattttttagggttaaatagatttggttttaaattttggttttgttatatagtagttataatatagtggggaaattatttaatagttttagaggttgtatttttttggttgaggattgtgagaatgagttataggttaaaaatgtatagaaaatataagaaattaagttaaaattttataattagtattttgtattaaatattataagagttttatttttttttgtatttttatgagaatgatattttatattgttatagtgtattttattgtaagttttataagagtaggtttgttgttttatatttagtatttagaataatgtgtagtaagtaataggtgtttaagaaatatttgatgaatattttattgagtaaattatttattgaataaattgggttaagaagttgaaattaaagttttagtaattaaaagaattgagtaattaaatatgtttttaaaaataatttattaattagttattatgtgatatttgtttatgtattattagattttatataatttaattgttatgagttgaaatattttaaataaatggtgataatgtttgttttatttgatttataggattattttgagggtaaaataagagtttgtttggaagtttttaaggttatttattaaaaaaaaatttaaaaaataaaaaataatataaaaagttaattagtttttttttttgttagattatagaaaggtattgagagatgaataggaatatagtttatttagttagattatgtaaatatataaagagtttagtaaatttgaaaatattgtttatatgggtgttttatgtgttagaaattatattattgttttatttaatttttagaatagttttgtgaggtaaatataaatatttttagtttagagattattatattgaatttttttagtggttttaggtttgttgggttttaaagttattatatattattttttgtagatttaataatttaaagagggaattagtaattgaattaaaattttattaatgtaaatataaattaaaaataattttatttattagtatatatagttaaaaatattatatttaaataatattttggttaggttttgtattttggatttatttgtttgattttttttataaattaattataaaatgatttgagaaattaaatggttttaggtttaaatgttatatatatagttaaatagttgataaataatttgtatttttgtgttattttttattggtttatgaaggggaggtgtatataaagttgatatttattggttagaatggttattttttttatttgtaagttttgtttgaaggttgtgatttaatatatttggattgtaataataataggagttttgtgtaatgtttggggtgattaaaaagtttttgaggtagttatagttttgattttagtgataaatgggggtatgtgtttatatttgggttggtggagggtttattttatttggtttggggggaaatgagtattaatttgtttatatagatgtaaatatagtttaaaatgtattagtatgttgatttaaatgtttgtaatgttagggtaaaggtaatttggttaatagggggaagtgaatagatggagatgtttggagatttaggtgttataatttggttaattgtggtgtaaataagggtaagttttttttttttgtttgtgtggttttgataatgatattagtttattttattaataaggtgggtggggggttagatgggttatatatatttattttttttaatgggattttagtgtgattttagttttgttgtgttattttagggtaagatgtgttttttatttggaagttgtaggaaagtgtggtgagagtgggttagtttttggagtggttaagagttttggaatagtgtagaggaagtttttattttttttggggttgggagtttgtaatttgtttgagagttttttgaggtgtgtgatgtggtttggaaggtattggtttatgttaattaggttggaagtgtttttttgtttgtgagtgtatttttagtgtgtagtttttgtttatgttgtggtagttgttttaggttttggtttgtgttgttttgtttatgttgaggtggttgtatagtttgttgaattgttgttggatttgaggggtgggtgatttggtaggtggtgtggtgttttttgttttgttgttgttttttttttttttatttgaggttgttgttgttggagggggaggtgggggtggtggtgattggttattttttgatggtatagtgtatttttgggtggttggattttaggtgaggtgagggtttgggtttgtagttatttaaatggtgaagtgtttgtttgtttgttgtttgtattgtgtttgtgttgttgtaaatgatgttgattgtttgtaggtatttgtagttttgagtatgggttgttgggaaatgtagtttaggttggtggtttaagggggttaaaaattatgtttaaaaaaattagtttttttagttttattaggggtgaaataaaagtattttttttgtattttaaatatgtatttttttattgtgagaatatttaatagggttgtattgatgagaaaatgtttaaaagatattgatgtgtgaaggttttgtatttaggttgtttttagaagtaaaatttttttattgtttggatatttttatttaaaaaatagggataatagtaagggtttgtttttgtatgtttatgaaattgtttttgtaaaaattttaatagtgagaaagttatgatagtgtaagggatttgatttaaatgattttatgttttttatttttgagttgtttttgtttatttttgggtgaagatttaattaattataggaggaatttaatttttaattttattttgaaataaagattgtaatagttttttttaaaaataaattttatttttgtttggggattagtttgtttttgtagaattaataaattagttataagattagaaattatgatttaggaggtttgtagttagaggttataagatttttgatttttttaattgtttttagggataatattattattgtaaaatttaagattggtgttggagatattttttagattgtgtattttgatgtattagttggtgttatttagattataatttggtttaataagttttgtaattttatttagtaatagaagatagtaagagtttattttaattttttgtgattttattttttatttgataaattagtatttgttaatttttggttttttatttgttaagttattttttaaaaattttagtttttgaattttttggtaggttgatttgaataattaaatttttgtttgttgtttagttggttttgtgtgaattaaattttttttttttttttgagatagagtttggttttgttgtttaggttggagtgtagtggtatgattttggtttattgtaatttttgttttttgggtttaagtgatttttttgttttagttttttgagtatttgggattataggtgtgtgttattgtatttagttaatttttgtatttttagtataggtagggttttattatgttggttaggttggttttgaatttttgattttaagtgatttatttattttggttttttaaagttttgggattataggtgtgagttattgtgtttagttaatttattttatttttaatttttttttttttattttaattttttaaattgttaatttttgatttataaatgggtttgatataaaatattttttagattgaggagtaatttgaggattgagtaatttgaggatttagaaggtattattgttttgttatttttgttttgtttggtgggatatgtaaattgatagagggaaaagtgttgggataaaagtaggggtttatggaaggtataatgataggtgggaggataggaaatggaattttgaagataggagaaaattaggtagataggtaataggatattttaggaataattttgagataatggaatttttttaagaaaattttagtaaaatttatagtaattagtaatgtttttggagttggttaagtgatgagttttaaggtgattatggggtaagaatagaag

SEQ ID NO: 347 - DNA, 14491 bp, Artificial Sequence
  chemically treated genomic DNA (Homo sapiens)
tattgtttatttttaaatttgtggaaattttgtggttagtatttgaagtttgttttattgttaaggttttttgttataagagatttttattttttgataataattaagaggtggaaaaagggaagttattattaattttttattttataaagtatatgaatttataatatgttaatagtggttaaaatgttttatttttaaggttatgttatatttttagaaagatttatatataagttagggagagatagggttaggttttttttgtattttgattattgtagaatgtttatttttatattttgtaataattttaatagtatgtgtgtttggggatttagagaattttatagtttttatatagtatttttttttatttttttttttaatttgtttttattaatgtattgttaggaggatgaagggtaaggaggatatataatttttttttataaagggtggaagtttattttaagaatggaaataaatttgtagattagtttttagagagattaaatttttgaaaaagtttaaaatttggtagatgaagtttttagaatagatgttagttattttgagattagtgttagagtggttttagagtggttgaggtttattgtttatttttgtttagtttattgttaagaatggtttttgtatttttattttttatttttttgagatggagttttgttttgttgtttaggttggagtgtagtggggagattttagtttattgtaatttttgttttttgggtttaaatgatttttttgttttagtttttagagtagttgggattataggtgtaggtaattatgtttggataatttttgtattttgtagagatggggttttagtatgttggttaggttggttttaaatttttgagtttaagtgatttgttgttttagttttttaaagtgttgggattataggtatgatttattgtatttggtttgtatttttattataaaatgttatttatttatttatttatttatttatttatttatttatttatttttgagatagggttttatttggttatttaggttggagtgtagtgagtgattatggtttattgtaatttttatttttttggtttaagtagtttttttattttagtttttagagtagttgggttataggggtgtattataatgtttggttaatttttttaaaaattttttgtagagatgggggttttattatggttgtttaggttggtttttaatttttgggtttaagggatttttttattttttggttttttaaagtgttgggattataggtgtgagttatagagtttagttgatttttgtatgtttaaatggttgggaataaagttaaaagaataataatattttgtgatatatgaaaattatattaaatttaaatgttggtgtttataaataatgttttattaggatttagttgtttttatttttttagtatttatggttgtttttgagttatgatgtttgagtttgaatagttgttatagggattgtatggtttgtaaaatttaaaatatttagttttttatagaatagtttgttgttttttgttttaatatggtttatattttatttgggaagttttgtgtttttagaggggagtatatttggtatgaaggttggtttaaatttaatattttagggaagttttttttgtttttgggttttagtttttttaattataaaatggggttagttgtagtgatttttggggatttgtttggtagtgggttaaataaataaagggagttggattttttggagggtaggattaggggttgagtaggagttggtgggtttgggtagggtgggttttttggggtttttaattttgtgggtgggtgtagtgttttgtaggttttgtttttattggggaattttgggtggggtgtgggtggtggggtgggggtgggttggggtggggttggtaggttgtttataagatgggtggtgtgtttgtttggggttatttgttgtagtttgtgtgttttttttagtttgtggtgttatggtttttgtttgtttgtttgtgttgttgttgttttttgtaggtggagttgttgagttggtgggtgtttggaggtttttgggttgggggtgaagtgggggtgtaggttggtgttttttttgtttgttggagtgtgggatgggggggggtagattgggggtatgttatttttaattggatattgaggtttgggaaattttgttggaaattttgttttggggttatgggttagtttttgggatggttttatgtgttgtgtgttttttgtttgttgttttttttgtttttttgggttttagttttgttgtgggttatgggtttgttagtgattaagttggtgttaattttttaatttttatatttttgttttttttttggtgattttggggtaggtttggagtgttgaattttttttttgtttttggggtgtttagagtagatagttttaggatttgagatggttttgggggttggggggttgtgtgtatttggaagggggagggttttagggttgtgtgaggtttttttttatatattaaggagaattgagttttaattttagttttggttttagttttgttattgatttgtgatttagggtaaagttttgtttttttgaatttttttttaatattgtattaagggtttgagggaatggggtaagaggggatattgtgttagggtttttagaaagttggggattttgttttttttgaggatagaggagaggaatggtttagatttaatatttagttaggagttgagtttttgttttttgtaagaagtgtgtttatttttttttaattgtagataagaaaattgaagtatttattttgagtgaggtgaagggggtaggggggagagaaggttttaattagtttagggaaattttttttttttattgtttattggtttttgttatagttgtttttgggttagtagaagttttatttatgtttgtagttggtttaggaggaggggggtaattttatttgggaagttggggggtatgggaattattggtgaaggtaatttgttttttatagtttgagttttgtgttttttttgtgttttttagttttagtttttagagtgagtgagtttttgtagtttaattattaatgttaatttttttgaaagttttggggtttttgtttttttgaatttatttagtggaaggttgattttgtttgtaggttttttttgaggaatgaatgagattttaggtaatatttttagtataattttaggtatgttatgatgattgtaaatgtggagtgtttttgttggggggttagatattgttttaataattttttaatgggtatatttaggagtttaattttaataataattttattgtgtattgtttttaaattggttttgaggttagagaggttaagtaatttgtttagggttatatagttaatatataataaatgggtgagttagattgaaatttaggtagttaggtttttaagtttttgttttagtttaatttttattttttgtgttattttaggtgttttattgttggtaattaaagatgggtttagaataggttgagattttaggttggaaggtaaaggaattttgaggtggaaggaaataaggttagagtgaggtgatgatttaatttaaattaaaggttattttgtttaaaatgttagtggttgaggatttaagttttttgtttttagtatagtgttttaaattaggttttgaaggatgtgttgggttaagtaattggggaagtatttgaagggatattatttaggtagtatagggaaaaagaggaaaggatttaggaggttgttgaggttattgtgtgtttagttatatgttagtttttttttaggggttgttgagtttttaggtgttttagggtgttgagtagttagttgtgttttgggggtattttgaaggatgtagtttgggggaaggggattgtgttagttttgtttgggtgatttattagttgtaggagatattagttttgggtagttgttttttgagataggtgttaagttttattttgattttagtttttttttttttggttaatgttatagattttttgtttgtaattggggtatagggttttttttttggtttgtttttttttttttttttagattgtggttggaaaaattagatatagttatggttggtttggattgaagagatgatttagtgtgtttttttttttttgtaggtagagaaaagtgaggtttagggagaaggattttgttaatagtagttaggagtgatagagtattttttatatgatagatttggtgtattttgtttttataaaaagatttgttatatggggattttattatgtttattttttaaatgtgagaggtaaaatggtattattttgggttagtagagggtatttaggattttaggatttttgattagtagtttttttattgtgggtggtgtttttttgattgttttattattttttttattatttttatattttggaagggaatttaggtttagtatttagttgtttttttttttgtttggttgggtttgttatattaaattagttttttttgtttagttgggagtattttttgatttgtttttttgttatttttttttaggttaattaaaggtagttttgttttgggagttttttttatttaaaggtgtttttatttaggggtatagtttattgatttggttttgggtttaggtggttgtggggaagtgttttttatttattatttattaagtgtattttagtttaaggatatttttggttttttatagtgttttttttttgattatatgggagtaggggtgggggtggaagtttaggggtttttaggatttttgagtgaatagtgagagtttttgggattttttgagtttagggagttattaaatatttatgaaaatatttgggttatgatttggagggttttatgaggttggggggaggtttttttttttgttgggttgatattttttattttaaaatgaaaggtttgaatagggtagtttttagagttttttttattttttaatttgattaataatttaagtatttattatttaaaagaggttttttttttgaaggaattaatttgagggaattaatatattttattaaatgttgaatttttttttttttttttttgtatattgagggtaggaattttgttttatttgtttttgtgaaatatttgttttttagtttgtatttaggaaatgtttgtatgaatgaataaatttgtgtatgtaattttattttaaatggtttattattgttatttattgttagtatgagtattttttagtattgtgaggtattattttttttatttttataggaaattgatgtttggaataatgtagtggttttttaaggttagaattaggtttttttgatagggtaaggtgtttggtttgagtgtttttagaatattttagatgaggaaatttgttgggtttgaaggtagatattttaggttttatttttgtgttgttgggtgattttgagtaaatatgttttgtttttgggttttagtgtttttaattttaaaataaggaggttggattattgttttttaagggttttttttgtttagagagtttattgatgaggggaggggttttttgttggtttttttggtgaagagtttaaataaattttagttttagaagagaagttggggtggtggggggatatttagtttttgttatttttagtttttagaaatagagggtttttttaaggatttggagtgttgagtttgtttgaatgaggagttggggaagttaggttgggtttttagttttatttttttgttgggagaagttggtttttagttgttttttaattttttggattggataggtgagtgtgatttttaaatgaatgtttaaaattggggtaaggggttggattgagtgttgtgagttattgtatgttagtgtagtttgtttgagttatttatttttttttaaatttttggttaataggatagttttgtggtgggggtgttggaatgagtttagagttttattttgttttttgggagttattgttttagtgtttggggtttgaggggatatataggatatgtttgtattaggttttgtatttttatagttttttgtttgtatgtagattttgatattgtatattgtgtagttagtttttaaaattgggttttagatttttgtagagtaggtagtattttttttttttttaaggtaaaattgaggttgtaattggtttgtatttttttagagagtaaaagttggtattgtttaggtttggtgtgattttaggattttttgatgtttgtgaggatttttttttgttttttggggttggttagagggtattgaaatattggtttggtgttatatagatttaattttagatgtgtgaagtttattttttattggttatatgaatttagttatgttattttatttttgagttttagttttttggtttgttaagaagattatgatattggtgtggtgaagtttaaaggagatgatagggttgtaaataaaggtatttagtattatgtttggtagggaggaggtgttatttagtgatagtttttttttttgtttaggttatttttatgttagggggttttatttttgaagattttgagtttaggttttttggaaagttttttttattttttttattttttttatttatttttatagttgggaggtgggaagggagaaatttagggtggggtttttggagtttaaattttttatttgtttattttagaagtgggttgtttgttaattattgaatgggtttatgtttaaataagaattagttttgggtagttttattttttttgttgggatttgttggagttttatgttgaatagtttgtagtttggagggagagggggtagggggtttgttaagggtattagattattttggatattgtttaggatttggggttatttttttgtgttggaggggtagagtttttatttttaaggaggttgagtgattgtaaatagtattttgaggggtggggtgttggtggatagaaaaggtatagtgttttgaaaagttagttttttgtatgtttttattgtatggtgttttagagagggaggagagagaatatatatgttaatagttggggttttatttaattttagaagaataagtttgattttttgggtttgtttgttattaattaatatagtggtgattttgggtatatttttgtattttattggggtttttttggttttatttgttgaaggttgggtgattgaaaaagagggtatagaaaattttagtttttgttttagttttgttgtttatttagggatatatatagttaatatgttattttgttgatgtgaattttagtgttttttataaaatatttgtggtatttaaaggttattattgttgtttggtaaatttgtaaagttttggttttattagtatttagatgagggtttttaatttggttagagtttggttttggggaggtggtgtttgtgtatatgttgaaaatgtaaattaagagttatagttattggggtttagatttttttattttttttagggggttgtagtattttttaaaaggttattttgattttagtagttttttttggttttgatttttttatagttatttttttttttttttttattttttagttttgtttttgttttttgttttttttaatttttatttttagtttagatttttttatttagtggtttttatttttttaggttgtattttatttttttttttgttttttaggtttgggagtttggttgttttagttttttttggtatagtagaagaggttgttggttaggtgatatttggggtaatggaaaggggaggtagggagaggttggtatgtgtggaaatagtgatttggtgaagtttagtagttagtggttaggtttgtggggattggtggtgttattttagtttttgggtgtgggggtagatgtggtatatggttggtttggttatttagagtggggatattttttgttttggagaagttttgttggagttgtttgtgggatagattgatttggtttggaggatggtttttttgggggttggtgagggaggttgggaagaggtaggaagttagtatttagggttgatttaattagttgagataaggttgtagtgtgggttttttattttgttttgagaatataggaggtttgtttatattttgagagtttttttagtttttggatttagtagggattttggatttgttgtttagattataagttttaattttaatgtatttttgtttttgaggttttgagggagttagtttttttttggttgtttttattggtaattggagtaatgtttagtttggttattgggttgggatagagggaggtttgtttttttgagatttgttttttatagattggaaaattgaggtttagagaagggaattgtttatgattatttagggagttagtaataagggtgttgggttagtttttggtagggagatatttagaggtttttgaattttttttttatttttagttggtattttaggattttggagtttttgttgtgggaatgggttgttttgaggtttggtgaaaagttggttgtaggtagtgttaggtttggtttttttttgagtgattgtgtttagagtaatttgattttgaaggtgatatttgaatttttattttatttttatttttagatttggtttaattatttaggtattagagtattagattatggattggtgtgtagtttttttttattttttagatttttatttatttattttgtttttggggatttaggtttttaagtagaattttaggtgtttttggttattgttatttgtatttttggggaaaataaaaatggtttttatttttgtttgtttaggataggtggttaaagttgtgtgattttgggtaggtttttgattatttttgtattttttttttatagtttgaagggatttgattggttgttgaaaagtttttgggtttagaagtaaaatgataatttattatagattatatttttttatagtttgtaaagtattatttttttgtttttaggttagtttttttttagtaatagaattgtttttgtaagtttttttaggtttttgattttttgagtattgattttattggttaggaggaaggtaggtaggggttaattatagttattatttattgattatgtgttgggttttttgtatatataaatgtattttttttaatttttattattttgtaaggtgttattagttttagttataaaagaggaaattgaggattttagagatgaaataaatttttaagtttatatagttaggaagtggtagaatttatatttgtgaatttgttttgatgtataattattttgggtggtagagttatagttgtgggttttaggttttagttattttggggaatgtttggtttttaagaagtgggtggggtggggaagaatagttatgagtagtgtatgttgttgggggttttttgttagaaattattttggtgggtttaggtgttggagttttaggtatttattattttttttttttattaaatttggtttgtttagttattatttttttggttttgttttttgaaagaagggttaagtgtgtttttgattttattttttttggggaggagttaggttgggagaggtttttattagtttatagttatttaagttttgattttgaatttttttttggtgttttagttaagtttttgtttttttgtttaagtgatattatttttatttttgtttatttttaggtagggatagggttgttttggagttttggtttagttagtgtgttgtggattggtgggttaggttggagagaagtgaagagtgggtggtagtgagaagtttagttgtggttgggatgtgtttttgaggaagatttggatttgaattttagttttagttttttagttgtatgatgttggataagtgatttagttgaattttagtttttttatttgtaaaatgggtagagtattttgtaaggttgttttgttatttaaatgaatttgtataaataaagtatttagtatggtgtttggtatgtagtggatattttttttagttatttatgttttttttggggtgatagaagttataggatttggggatagggttgggataggatttttttgtagttttatgtttatagttaaaagattagatggggagtataattgtaatgatagttgttgtttgtggatttgttgagatttttaggggtagttaatattttggaaggggagagaagataattttagtttgggagttaggatatttaggttttaagtttatttttgttgttagttgtttggatgattttggtaaaattttttgttttgtttgtttgttaggttataaaattagatattttttgttggtaggtgttagtttttgtagaataaaagagtatttttttttttttttttttttttaatagtttggggaagaatgtagtatttttaaatttttaggtattaattttagatttttattagttatagggttagtagagtttgtgggatttaggtttattgttttattttttattttttggagatagggtttttttttgttatttaggttggagtgtagtggtatgattgtagtttattgtaattttgattttttgggtttaagtgatttttttattttagttttttgagtagttgggattataggtgtgtataattatatttggttaatttttgtagagatggggttttattatgttgtttaggttgattttaaatttttgggtttaagtgagttttttattttggttttttaaaatgttgggattaagttattgtgtttagttattattgttttatttagttggtaatttttgttgtgtgtttatgaaagggataaagatataaggagatttgagagtttagagagggtgtttgtgtatgtatatatatgaatatatatgtttgggtaaaggtggggtgagttgaggagaatagattatatttttagttaggagtagggtggggtttatttttggttagggttgggtttggttgttgggtggtttggttttttaaagttattttagatttaatgggttttatttgaaaagagggtggaggagaggaggattgttggtgtttttttaatttttatataaaaaagagtgattgtttataattttatggggtttggttttgttttgttggtttagttttaaatggtttttatttattttggagttgtttttttttttgttagaggttatgggtggagaagggattaaaatagggtagagagggggtttttagagtttaaggagagatttaattttttgtgtttttttattattattgggagttggaagaagtttttttttagttttttgatttgttgtaggagggaaattttgggtttatttaaatgtagtttttgaagattttatttttttagagttttgaaataggattgaatttaggttgtgttgtggagttttggggtgattttagattagattagttttttttttggaaattgagtataaaaatgaagggttaaggatgaataggtgtttataaagagggttgaattgggaataaattttggttttagttttggttttgttgttgatttggttgtaagatttttatgttttatttttgtttatagtttttatttttttaatgtaaaatggaggtaatttttaatagttagtgggtatgttaattttatgggttgttttgaaatattttttagtatttttatatattgaaagagaggttggatgtataaataattttttatggtttttgggggtagtgaggggtgggaaaaggttttttagtttgagataagttttttgatggaattatagtttttgttgaggattttgatttggttaatagttggttaaagtgtattatttttttttttttttggttagattgatttttttatttaatagggtttttttggagtttggggtaggttggtgattttgtgtatatatgtgtttatgtgtgtgtttatgtgtttgtggttaaatgtttaggttagtgaagtttgggttttggtttagtgtggttattttttgtttgtgtggttttggataagtgattttatttttttgagtttttgtttttatttttgtaaaaagggattattaaaaggatttagataggttgtgtgtttggttaaggtttgttatttgggtttttgggggatttgttataggagatggaggtaggagtatagggattttgtttttaggtataggtatttgggtagttatgaggagttttttttttgttttgttaaattaaagttataggtatgggttatgtgtgggggtttgaattttagtattagtagtttggtagtttttgatttttgagttatgaagttatttttgagtagtatttaatttttttggttttttatttttatgggtgttaagtgtttagtattttttttattttttgggagagagtgatttttggttattgttttttttgtggtttgattttgtttttttttgggaatttagtattttttttttgtgggggtggaagagggtgtatgagggttaggttttatttgtttttttttagaagtttagtggggagagtataggagtggttttgaagtagtttttttgggttttttttgtaatgataataattttattttagggatagatgtttttttttagatatttttttttgttaatggtagttttagttgagtgaaggattgtttggggtgtttgaaatagagatttgatttttttttattttgagttatgtagtgaatgttttgtgtgattttgggtaagtttttgttttgttttgggtttagatttaagttgtgtgaaatgggaggataggagttttttgggttttggtattttgtgattttaagtagatttttagtttttgtagttatggtgtttggagaagatgggaatgttttttagtgggaggggtatggtgtattgaatttaatgaaaaattttaatttttttggtaaatattaggtattttagtgtttgaattaattagtagaataatgaattttgtttagagttgttgttttttgggtaaatagaagtttgagtttagaagttggaggaagggtgatgggtatttaaatgttttttgtgtttttgagggtatattgtttttatttggtggagttataggatgggagtagggtaattgatgtattgtagggttgtttgggatttttgatatttttttttggtaagtggtttggtgggagtggatttgagattttgttttgattagttgtgtttttatagggtagtggttgagtgatgattatgggtattggagtggatggtttgtgagggtagggattgtgttttttggtgtttgtatggtgttggtagtagagtagatttgtgggagatgtttggaaggtaagattgaatttaggagtatatttttgagttattaggtttgggtagtgttttgatttgaggttgttttagggtgtgtgtgaggtagttttgtttgttttggtttagattgatttagttgggaaaagtattttggattgggtaagattagaattaggagtttattttttgttttgtgtgaattagttgttattgtattatagagttttggagtgtagtattttagggttttgtgtatggagatttttggttttgaagttaggtagttttgtgtatgtaatttttgtttttttatttgttagttgtgttattaaaagaaaatgatttttttggttgtaaaaagaagtgaataatatgtttttagagttattaaaatagggtttagtatatagtaagtgtttggtaaaggatatttagttatattaataatttgattattattttatttattgtttttattttttttgagatgggggttttattttgtagtttaggttagagtgtaatggtgtgattttggtttattgtaatttttgttttttgggtttaagtaatttttttgttttagttttttgagtagttgggattataggtgtaagttattatgtttagttgatttttgtatttttagtagagatggggttttattatgttggttaggttggttttgaatttttgattttaagtgatttgtttgtttttgttttttaaagtgttgggattataggtgtgagttattgtgtttagttttatgtattatttttatttgtttagaatggaaagagatttgtttaaggatatgtggtgagttagaggtagagtgggatttaggatgtaggtttttaggttttggtttggtttttttttagtttttgaatgtttattttattagtttttgggtattagttgttatggagtattggggatgttggttgatgtgttttttttttttattttaga

SEQ ID NO: 348 - DNA, 14491 bp, Artificial Sequence
  chemically treated genomic DNA (Homo sapiens)
tttaagataaagaaaggagatatattagttaatatttttagtgttttatgatagttgatgtttaaaagttagtgaagtgggtatttagaaattagaaagagattaggttagggtttggagatttgtgttttggattttattttatttttaatttattgtgtgtttttaggtaagtttttttttattttgggtaaataaaaatagtatatgaggttgggtatagtggtttatatttgtaattttaatattttgggaggtggaggtaggtagattatttgaggttaggagtttaagattagtttggttaatatggtgaaattttgtttttattaaaaatataaaaattagttgggtgtggtggtttatgtttgtagttttagttatttgggaggttgagataggagaattgtttgaatttgggaggtggaggttgtaataagttaggattatgttgttgtattttagtttgagttatagagtgggatttttgttttaaaaaaaataaaaatagtaaatgaggtaataattaaattattaatatggttagatattttttattgagtatttgttatgtgttgggttttgttttaataattttggaggtatgttatttatttttttttatagttgagggagttatttttttttggtgatatagttggtagatggaagagtgaggattgtatatgtagggttgtttgattttagagttaggagtttttatgtatagggttttgggatgttatattttagggttttgtgatgtagtggtagttgatttatataggatagggagtgggtttttggttttggttttgtttagtttaggatattttttttagttgagttagtttgggttgggatagatagggttgttttatgtatattttaagatagttttaggttagggtgttgtttagatttgatgatttaggagtgtatttttggatttagttttgttttttaaatattttttatagatttattttgttgttagtattatgtagatattgagaggtataatttttatttttatagattatttattttagtatttataattattatttagttattattttgtggagatatagttgattaggatagagttttaggtttatttttattaaattgtttgttaaaagaaagtgttaaaggttttgggtagttttatagtatattagttattttgtttttattttgtagttttattgagtgggaataatgtatttttaagagtataggaaatatttggatgtttattattttttttttagtttttgggtttaggtttttgtttgtttagagaatagtagttttgagtaaagtttattattttattaattaatttaaatattaaagtgtttagtatttgttaggagagttggggttttttattaagtttaatatattatgttttttttgttgaaagatatttttattttttttagatgttataattgtaggagttgggggtttgtttagaattatagaatgttaggatttaaggagtttttgtttttttgttttatataatttgaatttgagtttggaatagggtagggatttgtttaaggttatatagagtgtttgttatataatttaggatagaaagaggttaggtttttgttttggatattttaggtagttttttatttagttgagattgttattgataaaggagggtgtttgagaaggaatatttgtttttaagataaggttattattattgtaggagaggtttaggaaagttgttttagagttatttttgtattttttttattgggtttttggggagaggtaggtggaatttgatttttatgtatttttttttatttttatagagggagaatgttggatttttggaagggagtggggttaggttataaggaaggtagtggttaggaattatttttttttggggagtggggagaatgttgaatgtttggtatttgtgggggtggaaagttagagaggttaagtgttgtttagagatgattttatgatttgggaattaggagttgttgggttgttggtgttggaatttaagtttttgtatatagtttgtgtttgtggttttggtttggtagagtaggaggaaggttttttatggttgtttaagtgtttatatttaagggtagggtttttgtgtttttatttttattttttgtggtaaattttttaagaatttaagtgataggttttaattaagtatatagtttgtttaggtttttttaatagtttttttttgtagagatggaaataagggtttagaaaagtaaagttatttgtttaaggttatataagtaggaagtagttatattgggttagaatttaggttttattgatttggatatttaattataaatatataaatatatgtatgaatatatatgtatatggggttattagtttgttttaggttttaagggagttttgttaagtaggggggttaatttagttgggagaaagaaagaatggtatattttggttagttgttgattaggttaaagtttttaataggggttgtagttttattaggagatttgttttaggttgagagatttttttttattttttattgtttttaggagttatggaaggttgtttatgtatttagttttttttttagtatgtgaaagtgttaagaggtattttaaaataatttatgggattagtatgtttattggttgttaggaattatttttgttttatattagagaaatgaaggttatgagtgaaagtggggtgtgaagattttgtagttaagttagtagtaaaattaaggttgaaattaagatttatttttagtttagttttttttgtgggtatttgtttatttttaattttttatttttatatttagtttttaaaaaagaaattagtttagtttgaagttattttggggttttgtggtatggtttggatttgattttattttaaagttttgaaaagatggagtttttaaaggttgtatttagatgagtttaggattttttttttatagtaagttaaggggttgggaagaaattttttttagtttttagtggtgataggaggatatagggaattaaatttttttttgagttttggaagttttttttttgttttgttttggttttttttttatttatgatttttgataagagggaaggtaattttaaagtggataagagttatttaggattaggttagtaagatgggattaagttttgtgggattgtgggtaattatttttttttgtgtaaaggttgggaaggtattaatggttttttttttttttgttttttttttagataaagtttattgagtttggggtgattttgaagaattaggttatttagtagttaggtttagttttgattagagatggattttgttttgtttttggttaagaatgtggtttgttttttttagtttattttatttttgtttaggtatgtgtgtttgtgtgtatatatgtataggtattttttttgggtttttaagtttttttgtatttttgttttttttatgaatatataatagaaattattaattaagtaagatagtggtggttaggtatagtggtttaattttaatattttgggaggttaaggtgggaggtttatttgagtttaagagtttgagattagtttgggtaatatggtgaaattttatttttataaaaattagttaaatgtggttgtgtatgtttgtggttttagttatttgggaggttgaagtgggaggattatttgagtttaggaggttgaggttgtagtgagttatgattgtgttattgtattttagtttgggtgatagaggaagattttgtttttaaaaaataaaaaatagggtaatgggtttaggttttatagattttgttggttttgtggttggtggggatttgggattagtgtttgggggtttagagatattatatttttttttagattgttggggagaaagaagggaggggaagtgtttttttgttttatagaaattaatatttgttaatagaaggtatttgattttataatttagtaaatagataagataagggattttgttaaggttatttaagtagttggtagtggagatggatttagaatttaggtattttggtttttagattggaattattttttttttttttttagggtgttggttgtttttaagggttttagtaaatttataggtagtagttgttattatagttatattttttatttagttttttggttataggtatgaagttatgaaaaggttttattttaattttatttttaaattttatggtttttattattttaggaaaagtatgagtgattaaaaggagtatttattatatgttaagtattatgttgggtattttgtttatataagtttatttaaatggtaaaatagttttgtaaggtgttttatttattttgtagatgagaagattgaggtttagttgagttatttatttaatgttatgtaattagaaagttagagttgggatttaaatttagattttttttaagaatatgttttaattataattaggttttttattgttatttattttttatttttttttagtttaatttgttagtttataatatattggttgggttagggttttagggtaattttgtttttgtttaggagtaaataaaggtgaaagtgatattatttaaataaaggaatagaaatttggttggggtattagagaggagtttagggttagggtttggataattgtgaattaatgagagttttttttgatttggtttttttttaggggaggtagggttggggatatatttgattttttttttaggaggtaagattagaagggtaataattgggtaagttaaatttagtggggagaggggatggtgagtatttggggttttaatatttggatttattagaatgatttttagtaggagatttttagtagtgtatattatttgtaattgtttttttttattttatttattttttaagggttagatattttttagaatggttaaaatttggggtttataattgtgattttattatttagagtggttgtgtattaaggtagatttataagtgtgagttttgttattttttaattatatgagtttgggagtttattttatttttgaaatttttagtttttttttttgtgattagggttggtagtattttgtagggtgatgaggattaagaggaatgtatttgtgtgtgtaagggatttagtatgtgattaatgaatagtggttgtgattaatttttatttgttttttttttggttagtgggattagtgtttaaaggattagaggtttgggaaaatttgtagaggtagttttgttgttggaaggaagttagtttggggatagggagatggtgttttgtaaattgtaaaggaatataatttataataggttattattttgtttttgagtttagagattttttaataattaattaggtttttttagattgtgaaaaaaagatatagagatagttagagatttgtttaaggttatatagttttgattatttgttttaagtagatagaggtaaagattatttttattttttttgaaggtgtaaatgatagtgattagaaatatttgaaattttatttggggatttgggtttttagggataaaataaataaataaaaatttagaaggtaaaaagaaattatatattaatttatggtttggtgttttggtgtttgaatggttaaattaggtttgggggtgggggtggagtgagggtttaaatgttgtttttaaggttgggttattttgaatataattatttaggagagagttaggtttggtattgtttgtaattagttttttattaagttttagggtagtttatttttatagtaagaattttaggattttagggtgttagttagaaatgggggaagggtttaggagtttttggatgtttttttgttaggagttgatttagtatttttgttattaattttttggatgattgtggataatttttttttttgagttttagttttttaatttgtaaaagataggttttaaagagataagtttttttttgttttagtttagtaattaagttgggtattgttttgattattggtggagatagttaggagggggttggtttttttagggttttagagatagaggtgtattgaagttggagtttgtaatttaggtagtagatttgaaatttttgttggatttgagggttagggaggtttttgggatgtaaataaattttttgtgtttttagagtagagtagagagtttatgttgtagttttattttagttgattagattagttttgggtgttggttttttgtttttttttagttttttttattgatttttaaggaagttattttttagattaggttagtttgttttatagatggttttggtagggtttttttaaggtaaggagtatttttattttgggtagttgggttagttatgtgttatatttgtttttatgtttagaggttagagtgatattgttagtttttgtaggtttggttattgattgttgggttttattaagttattgtttttatatatattagtttttttttgttttttttttttattattttaggtgttatttgattagtagttttttttattgtgttagagaaaattggagtagttgagtttttgggtttggaggatagggggaggggtgagatgtagtttgaaggggtgggggttgttgaataggaaggtttgggttgaaggtgggggttgggggaagtaggaggtaagaataaggttgggaagtgggggagggaggaaggatggttgtagaaaggttaaagttagaaagaattgttgagattagagtgattttttggggagtattgtagttttttgaaaaggataaaaaggtttaaattttaataattgtaatttttagtttatatttttaatatatgtatagatattatttttttaaagttaaattttggttgggttaagaatttttgtttaggtgttaataaagttagaattttataagtttgttaaatagtgatgatgatttttgagtgttataggtgttttatagaggatattggagtttatattaataaagtgatgtattaattgtgtgtgtttttgggtgagtagtagagttaggatgggggttggagttttttgtatttttttttttagttatttagtttttagtagatgggattagagaggttttagtgagatgtaagaatgtgtttaaggttattattgtgttagttaatgataaataagtttaagaagttaggtttatttttttaaggttaaatgagattttaattgttgatatatgtgtttttttttttttttttttagggtattatgtagtgaaaatatatgagaaattggttttttagaatattgtattttttttgtttattaatattttattttttaaagtgttatttgtaattatttagtttttttaagggtagaaattttgtttttttagtataggagggtgattttaggttttggatagtgtttagagtggtttgatatttttggtaaattttttgttttttttttttttaggttgtaaattgtttagtatgaggttttagtaaattttagtaggagaggtggggttgtttagaattggtttttgtttaaatataaatttatttgataattagtaaatagtttatttttaagataaataaataggagatttggattttaaaagttttattttagatttttttttttttattttttagttgtgggggtagataagggggataagggggatggagaaagttttttaggagatttgggtttagaatttttagagataggattttttggtatgaaggtggtttgggtaaggaagggaattgttattaagtaatattttttttttattaggtatggtattaggtgtttttatttatagttttgttgttttttttaagttttgttatattggtattatgatttttttaatagattaggaggttggggtttagaggtggagtagtatgattgaatttatgtagttagtaagaggtggattttgtatgtttggagttaagtttgtgtaatattaagttaatgttttaatgttttttggttagttttaggaagtaaagaggagtttttataaatattagaaaattttggggttatattaaatttgaatagtattagtttttgttttttgaaaaaatgtaggttagttgtagttttagttttgttttaaagaggaaaaaagtattatttgttttgtagaggtttaaagtttaattttgaggattggttgtataatgtataatgttaaagtttatatgtaggtaaggggttgtgaaagtgtgggatttagtataaatatgttttgtatgtttttttgagttttggatattgaaatagtgatttttaaaggataaggtaaaattttgagtttattttaatatttttattatagagttgttttattagttaagagtttgaaaggaaatgggtgatttaggtaggttatgttagtatgtagtgatttatagtgtttggtttagttttttattttaattttaagtatttatttggaaattatatttgtttgtttagtttgggaggttgaaggatagttaggagttaattttttttaatagggagatggggttgggagtttagtttggtttttttagttttttatttaggtaggtttagtattttaagtttttggaaaagttttttgtttttaggagttggggatggtaggagttgaatgtttttttgttattttaattttttttttgagattgggatttgtttagattttttattaaggaggttagtaaagggtttttttttttattaatgggttttttgggtaggaaggatttttggaaggtaatggtttagtttttttattttagagttggggatattgagatttagagatagggtatgtttgtttaaggttatttagtaatgtagaagtaggatttaaggtatttatttttaaatttagtaaatttttttatttggaatattttgaggatatttaaattagatattttgttttattagaaggatttggttttgattttaggaagttattgtattgttttgagtattaattttttgtaaaaatagagaaaatggtattttgtagtattgggagatatttatattagtaataaataatagtaatgaattatttagaataaagttatatgtatgaatttatttatttatataagtattttttgagtataaattaggggataggtattttataaaaataaatagagtagagtttttgtttttagtgtgtggggggagagagggagggatttagtatttggtggagtatgttaatttttttaagttaatttttttaagagagagattttttttgaatagtaggtatttaagttattaattaaattgagagatggaaaggattttggaggttattttgtttaaattttttattttaaggtgggggatgttagtttagtggggaaagaggtttttttttaattttatggaattttttaaattatggtttaaatatttttgtgggtgtttgataattttttgggtttaagaagttttaagagtttttattgtttatttaagggttttagaagtttttaggtttttgtttttatttttatttttatgtaattaagaagaggatgttgtagaagattagaaatgtttttaagttaaagtatatttgataggtgataggtgggggatatttttttataattgtttgggtttggggttaagttagtaggttgtgtttttgggtaggaatatttttgggtggaggggatttttaaaataaggttgtttttaattggtttgagagggagtggtaggaaggtagattagggaatgtttttagttggataggaagaattggtttagtatagtaagtttagttaaatagaggagaggatagttgggtattgagtttgggtttttttttaaaatatgggggtggtaaggggaatgatggaatagttgggggaatattatttataatgggagggttattagttagagattttggggttttggatgttttttattaatttaaagtagtattattttattttttatatttgggaagtgggtataatagaatttttatgtgataggtttttttgtgaggataaaatgtattagatttgttatataaaaagtattttattatttttaattgttattagtaaagtttttttttttgggttttatttttttttatttgtaaaaagaaaaggatatgttggattatttttttagtttgagttaattgtgattatgtttgatttttttaattataatttagaaaagagggaggggataggttaaaggggaagttttgtgttttagttataggtaggaggtttgtgatattagttaggaaggggagagttgaggttaggatgagatttgatatttattttaggaagtagttgtttagggttgatgttttttgtagttgatgggttatttaggtaggattgatatagttttttttttttaaattatattttttagaatgtttttaggatatagttgattgtttagtattttgaagtatttgaaggtttagtagtttttgggaggaaattggtatgtgattgggtatatggtgattttagtaattttttgggtttttttttttttttttttgtattgtttaggtggtatttttttggatgtttttttagttgtttgatttgatatattttttagggtttagtttagagtattgtgttagaggtagaaggtttgggtttttagttattaatattttaggtaaggtagtttttggtttaggttaagttattattttattttggttttgtttttttttattttagaatttttttgttttttagtttaaaattttaatttattttaaatttgtttttagttattaatgatgggatatttggagtagtataaagagtagaagttaagttaaagtagaaatttgaaagtttggttgtttaaattttaatttgatttatttatttattgtgtattaattgtgtgattttgggtaagttatttaatttttttagttttaggattagtttaagaatagtatatagtaagattgttgttggaattaagtttttggatatatttattagaaagttattagagtaatgtttggttttttgataaaggtgttttatgtttgtaattattatggtatgtttggaattgtgttggaagtattgtttagggttttatttattttttaagaagagtttgtaggtagaattaattttttgttaagtaaatttagaggaataggagttttaaggtttttaaagaaattaatattaatggttaaattgtaaggatttatttgttttgaaaattggggttaaagggtataaagggggtataaagtttaggttgtgggggatagattgtttttattagtaatttttatgttttttaattttttagatgagattgtttttttttttttaagttggttgtgggtatggatagagtttttgttggtttagggatagttatgatggaggttagtggatagtgagaaggaaaggtttttttgggttgattgaggtttttttttttttttattttttttattttatttaaggtggatgttttaatttttttatttgtaattgagaaaaaatgaatatattttttgtagaaagtagaggtttagtttttggttaagtgttgagtttaaattattttttttttttgtttttgaaaagagtagagtttttaattttttagaaattttaatgtagtgtttttttttgttttatttttttagatttttggtgtagtattgggaagagatttagaagggtaggattttgttttaagttataagttaatgatagagttggggttagaattgaggttagggtttagttttttttggtgtgtgaaagagggttttgtataattttaaaatttttttttttttgagtatatgtagttttttgatttttagggttattttggattttaaagttgtttgttttgggtgttttgagagtgaggaggggatttagtgttttaagtttgttttagggttattagggaagggatgagggtgtgggagttgaagagttgatattggtttagttattaatgagtttgtagtttgtggtggggttgaggtttggggaggtgggaagagtaataggtgaggggtgtatggtgtgtgaagttattttggaggttggtttgtgattttggagtaaagtttttaataaagttttttgggttttggtgtttggttgggggtagtgtatttttgatttgtttttttttattttatgttttgatgaataaaggaggtattggtttgtgtttttgttttgtttttagtttgggaatttttaagtatttattgatttggtgattttgtttatgaagaatagtagtagtgtgaatagatgggtgggggttatggtattgtggattggagaaggtgtgtaggttgtggtgagtggttttgggtgggtgtgttatttattttataggtggtttattggttttgttttggtttgtttttgttttgttgtttgtattttgtttggaattttttagtggaagtgaggtttgtggggtattgtgtttgtttgtggagttggaaattttaagggatttgttttgtttgagtttgttggtttttatttaatttttagttttattttttgggaggtttaattttttttatttatttgatttattgttaggtaggtttttagagattattgtggttaattttattttatagttggggaaattaaggtttagggatgggaaggatttttttagggtgttgagtttagattagtttttatattgggtgtgtttttttttgaagatatagaattttttaaatgggatgtgaattgtgttaagataggggatagtaaattattttgtaaagggttaaatattttaggttttgtgggttatatgatttttgtggtaattatttaaatttgagtgttgtagtttaaaagtagttataaatattaaaggaatgagggtagttaggttttaataaaatattatttatagatattgatatttgaatttaatataatttttatgtgttatgaaatattattatttttttgattttatttttaattatttaaatatgtaaaaattggttgggttttatggtttatgtttgtaattttagtattttgggaggttgaggaataggaggattttttgagtttaggaattggagattagtttgggtaattataatgagatttttatttttataaaaagtttttaaagaaattaattaggtattgtggtgtatttttgtggtttagttattttggaggttgaggtgggaggattgtttgagttagagaggtgaaagttgtagtgagttatgattgtttattgtattttagtttgggtgattgagtgagattttgttttaaaaataaataaataaataaataaataaataaataaataaataaatgatattttataataaaaatgtaggttggatgtagtgagttatgtttgtaattttagtattttgggaggttgaggtggtggattatttgagtttaggagtttgagattagtttggttaatatgttgaaattttgtttttataaaatataaaaattatttaggtatggttgtttgtgtttgtaattttaattgttttggaggttgaggtaggagaattgtttgaatttgaggggtggaggttgtagtgaattgagatttttttattgtattttagtttgggtaatagagtaaaattttgttttaaaaaaataaaaaataaaaatgtaaaaattatttttagtagtgggttgaataaaaataggtggtgggttttagttattttgagattattttgatgttggttttagagtggttgatgtttgttttaagggttttatttattagattttgaatttttttaaaagtttgatttttttgagaattggtttgtaagtttatttttatttttagggtaagtttttattttttataagagaaagttgtgtgttttttttattttttatttttttaatagtgtattggtgggagtaggttgagggaagaagtggaggggggtgttatatggagattgtaaaattttttgggtttttaagtatatgtattgttggaattattgtagggtgtgaaggtgggtattttatgatgattgaagtataaaagaagtttaattttgtttttttttgatttatgtataaatttttttaagggtgtaatatagttttagaagtaggatattttggttattgttggtatattatgaatttatatattttgtggagtggagaattggtagtgatttttttttttttattttttaattattattaaagaataaaagttttttgtggtagagaattttggtagtaaagtaaattttaaatgttgattatggggtttttatagatttaaaggtaagtaatg

SEQ ID NO: 349 - DNA, 2534 bp, Artificial Sequence
  chemically treated genomic DNA (Homo sapiens)
aggtaggaaagtgggatagttggggagttggattttattttttgtgagttttgttggtatttgatggtatgtggtttggagagggtaggtgatttggtgtggagggttagagggtaaatttttaaataagtggtaataggttattaatttgaaagggaaaattgtgtagtgatgggaaatgtgtttaataaatttattgggtgattaattataaaggttgggttggagttttagaggttgtttgttaaatattttattaagtggtattttgaaagttgttatttgtgtattttgggagtttagaggggattttgagggggaatgaggtttggaggatggaattatttttaggtagattgagaaggagtttggattttatttttaaatatagtttggagtttataggttagaggttttaatgggagaaaagttaaaggaagagggtgtagaaaggagttttagggaattggtggttatgtgattttgagtaaattttatttttttttgagatttagtgtttttatttttatggttttgtgtgtgttatagagatatggtggggattaaatttgattgtgatatgaaagtgtttgggaaattttatggttttatttaaatatgagttatttttatttgaattaaggggggaagttatttggtaggattaggaattttatttttttgaatttttatgggttttgttgaggttgaagtagttaggggttaaagttagtttttagtttttggaagggtattgtgaaagtggatttgatttgagaagttgttttttgatgtgggtagttatgtgatgttagttttgaataagagggggtagtttggagtttggaaaggtgttagtgtaggtggggtttatgtttagattttttttgttgattgttttgatgatttatttttatattttagtttttttatttttattgtagagttggaaagggtgtggggaagagaggagagggaggtaggttttgggttttggttttgttttttgtttttttttatttttttttgggtttggttatttagttaaaaggtaggttaagagtaggagagatatagagtttggtattggttttaggtagtagttagtttgttgtttgtttgtgtgtttttagagttatggagagagttagtttgatttagaaggttaagttggtagagtaggttgaatgttatgaggatatggtagtttttatgaaaggtgttgtggagaagggtgaggagtttttttgtgaagagtgaaatttgtttttagtagtttataagaatgtggtgggtggttagagggttgtttggagggtgttgtttagtattgagtagaaaagtaatgaggagggtttggaggagaaggggtttgaggtgtgtgagtattgggagaaggtggagattgagttttagggtgtgtgtgatattgtgttgggtttgttggatagttattttattaaggaggttggggatgttgagagttgggttttttatttgaagatgaagggtgattattattgttatttggttgaggtggttattggtgatgataagaagtgtattattgatttagtttggttagtttattaggaggttatggatattagtaagaaggagatgttgtttattaattttatttgtttgggtttggttttgaatttttttgttttttattatgagattgttaatagttttgaggaggttatttttttggttaagattatttttgatgaggttatggttgatttgtatatttttagtgaggatttttataaagatagtatttttattatgtagttgttgtgagataatttgatattgtggatggttgataatgttggggaagaggggggtgaggttttttaggagttttagagttgagtgttgtttgttattgttttgttttgttttttttagttttttattttgttgagaggattagtatggggtgggaggttttattttttttttttaggtgttgtttttgttttaaagggttttgtggagagggattggtagagttgaggttatttggggttggggattttattttttttgtagttgttgagtgtatttaattattggttatgtttttatttttgttttttgtatttgtttttttttgattttaggattaggttattttttttttttttttgttttttttttgtttttgttgtttttgattgtaggaattgaggagtgttttgttttgtggttgagaattggatagtggtaggggttggagatgggtgtgtgtgtgtgtgtgtgtgtgtgtgtgtgtgtgtgtgttagtgtaagattgagattgagggaaagtatgtttgttgggtgtgattatgtttttttttaataaagtttttttgtgatattttttttgttttttttttagtttttggtgatgggttgggagtgggattggaatttgatttagagattttgattttggatttttgagttagggttttgaattttttaggtggtttagtggtttgtatgtaagattttgagtttaggtgaggttggggttt

SEQ ID NO: 350 - DNA, 2534 bp, Artificial Sequence
  chemically treated genomic DNA (Homo sapiens)
ggattttggttttatttggatttaaagttttgtgtgtgggttattgagttatttagggagtttagggttttaatttagaggtttaaagttagggtttttaagttagattttagttttatttttagtttattgttaagaattggaagagagataggaggagtgttataggggaattttattgagaggaaatatggttatatttagtagatatgtttttttttagttttggttttgtattggtgtgtgtgtatatatatatatatatatatatatatatatttatttttagtttttgttattgtttagtttttagttataaggtgggatattttttaatttttatgattagaggtagtaggggtaggagggaggtaagaggaggggagaagtagtttggttttggggttgggaggaagtgggtgtggagagtaggggtgggggtatgattagtggttaggtgtgtttaatagttgtaagaagagtgggatttttagttttaggtggttttagttttgttagtttttttttatggagttttttggagtaagaatagtgtttaggggagaagggtggggttttttattttatattagtttttttggtagggtgggggattggagggggtagggtggggtggtggtgggtaatatttagttttggggtttttggggagttttgttttttttttttttggtgttgttggttgtttatagtgttaggttgttttgtagtagttgtatgatgagggtgttgtttttgtaggagtttttgttgagggtgtgtagattagttatggttttgttgaaagtggttttggttagagagatggtttttttggggttgttggtgattttgtagtggaagatggaaaagtttagggttaggtttaggtggatggggttggtgggtggtattttttttttgttgatgtttatggttttttggtaggttgattgggttgagttaatgatgtgttttttgttgttattggtggttattttggttaggtagtggtagtagttattttttatttttaggtagaagatttggtttttggtgtttttggtttttttgatgaggtggttgtttagtaggtttagtatggtgttgtatatgttttggagtttagtttttatttttttttggtatttatgtattttgggtttttttttttttgagttttttttgttgtttttttgtttaatattggatagtattttttaggtagttttttggttgtttattatgtttttataggttattgagagtaggttttgttttttgtaggagagttttttgtttttttttatggtgttttttatgaaggttgttatgtttttatagtgtttggtttgttttgttagtttggttttttggattagattggttttttttatggttttggggatatataggtgggtggtgggttaattgttgtttgggattaatgttggattttgtgttttttttgtttttggtttgttttttggttgggtggttaggtttagagaagggtggggaggagtagggggtgggattagggtttaagatttgtttttttttttttttttttttatattttttttggttttgtagtaaaggtaaaaaggttgggatgtgggggtgaattattagaatagttagtaggagaaatttgggtgtgggttttatttgtattggtatttttttaggttttaggttgtttttttttgtttggggttggtattatatggttgtttatattaggaaatggttttttaaattagatttatttttatagtgtttttttaggggttaaggattggttttagtttttggttgttttagttttgatagagtttataaaggtttaggaggatggggtttttaattttgttaggtaatttttttttttggtttaggtgaggataatttatgtttaggtagggttatggagttttttaagtatttttatattatgattgaatttaatttttattatgtttttgtgatatatataggattatagagatgggaatattaagttttagagaggggtgagatttgtttaaagttatatagttattaattttttgaaatttttttttgtattttttttttttagttttttttttattgaggtttttgatttatgagttttagattgtgtttggaagtgagatttaggtttttttttagtttatttgaagatggttttattttttaggttttatttttttttagggttttttttgagtttttagaatgtgtaggtggtagtttttagagtgttgtttaatgaagtgtttaataagtagtttttgaagttttagtttagtttttgtaattagttatttagtaggtttgttggatatattttttattattatataatttttttttttaagttggtggtttgttgttatttgtttgaggatttattttttggttttttatgttaggttatttgttttttttaagttatatgttattaggtattagtggggtttatagagggtggggtttagttttttggttgttttatttttttgttt

SEQ ID NO: 351 - DNA, 3716 bp, Artificial Sequence
  chemically treated genomic DNA (Homo sapiens)
atttatttgtttatttttagggaaattagattaataaagatttggaaaggaatataaaattttaaagttaggtttatggtttttataatttttagatggggtagataatatgttatggaggtttagagatagttttgagattatgtaatagttattgtttttttttttgtggaatgtttatttaaaaaagtttaagggttttataagttgtttaatgaattttatagatatttttaatttatttttatttattggaatttttttttaaataattttttaaattttatgtaataatgatgtatatttttgtttaatattaagaagtttttatgtaaaattgaagaaataaattgtttttataaaagaaggaaaaaggaattatatttttagaatattttgtttatttagatatatagatttgatttttgttttattgtttgtggtattttggattttagggttattgatgaggttgggttagtggttatattggtttttgggtattttttttttggttataaaagtttattttagtagtattatttaaattggatttattttttattttatagttttggtttgggttgagatttttttaatagagtttattagtgagtttgttattttgttttgtggttatttaggtttggagttaagagttatttataggaaaattagtatgaaatttttaagtttgtatattaaatattaatattattaagggttatagtggaaaagaggtttgttgagtttaagggtttttattttatttttaattttttttggttttttttttttatgttgtgtttttggtaaattttattatgttttgattattttaggtttttttagtttttttttgggaattaggttttttggataggtaaagaggtagatatttagttgttaggtgaattagatgtttttattagattttttaatttttattttggtgatattttaaaggattataaattatgtttttagtgtttggttagagaattgggaaagagttggaagatgagatattaaattttattttatggtgatgtttgaattaggttggagttggttttatatgttttttattgtgtatgatttttttaattgttttagtgggaatgtgttattgtaaaataaagtgaaattgttttttttattgtttgtaatttatagaggggtggttttgattatataaattaggtattttttaaatttattgattttagggtggaaggagggatttttttttaagtatttattttgaattatgtttttattagtaaatttaaagtttaagggtaaaaatttatgattttttattttgtaatagttattagatgtttatagtatattagatttgtggaaaatgtatgttttgtgtatggaagagggagagggagtgttaggagttgttttttgttaaaaaatgtattttgatatttaaaggtataggttggtggagatttagggaatttgggaaagtttaggtttaatttaggtttgtgtgggttttttttgattttataagatgaggagtgggttttggttttgggtattttggtgttgattgtgagtttttagtagaggtttagagttttggtttggtagttgagggaagtgggggggttttttagaagaagaaagggttaaggttattttggtgtttttttagtagtagtagagggtggtggttggtgttgttgttggttggggttttgaggaaggtgtgggttagttggggttgggtttgtgtttttaggagttgttattgttttagggagtaagttaggttgggatgtagtgtttgtgtgggatttttatttgttattaagatttttataaattttgttttattttgttttatgttttgttttaaggttgtttttttgatttggggttttgttttaaggttgtttttttgttttgttgtttggtggtggttgtatgttgtttggatataaagggttggttttatattttagggattagtgagtggttttgagaggttttggtttttgttttttaggtggtttgaggatgttatggttgagtgtttgatatttggggaggtagttattgattatttggattgtttgtgggtttgggagaagtttgtgtatttggatgagaagtagtatgtttggttgtttttaattattgaggtatagttagttttggagtggatggtgaggtagtaggggtagtttttgggagtttgggatgttttaggaagggtgaggatttaaggagtatttattatggggtagggaggatttttatagatgaagttattttgagttgggttttggaggatgaataggagttttttaggtagggaagaagggtgggaaaattgtaaaggaatgttggttaaaggggtggatttagtgtttgtggagtgtgattataatgttgattatagtaggtattttttgggttttggggttttaatttttaaaaatgggtatttttaagtgatttatttatatggttgattattggaattattttaggtgggttttagaaatttgtatttttaaaaagaatttttaatagtttagggttaattaggtatagtaaatattggtttagagtgtgaagtattttttattatttttgggttttatttagaaaataaatttaataagtgatgttgtagtataagtgttggtattgaattaatattgatttttttaatgtgtgatgttttaagatgggtttttaatttatgttaagtttttgttaaagaaatagataagttttttataagtatttggatttatttaatgaaaaagagttaaaaaatgtttaaattttttttaaatatatattgaagaaagtataaaaattaaaaaatatattagaatatgtatgtttagtagtaattaaaaattattgagtgttgattgtgtttttatagatgggaaattgaggtataaaaatgtatatttgtttgaggtaagattgttagtaggtaatggggttggaattttaggtttttaattattataaaatttgtatttttattggtattttaattttttaaatatgtttttattttaaaaattaagttaaatatttatttttttaaaattaaaatttgaagaaataatttgaagatttagtggatttttttttttaaatttttgagaaattttttttttaatgtgatattaaaattatgaattagatagttttttataaaattatgatatatgttttataaaaaataatttattagtaaattgtgggatagattttgttttatattattgaaaaggttagtattttttttttttttttttttttttgttgtttttttttttttttgtagatatagggttttgttttgtgatttaggttggttttaaatttttggttttaagtgatttttttgtttttgttttttaaagtattggaattataagtgtgagttgttgtaatttgttagaaaaaagtgtgttttttatggttttgtttgggtggttagatatgtgtgtgtgttggtggttttggtttagttagagtttttgagaggagtatgtatggtttaaggaagtgagttttagggaatagtgatgattattattttatatttggatttttgtttagatgggtggatggttggtaggagggattttggttttttgtgtttggagaagttttggtaagtggaatttgaaagtatgttttgttttttttttttttttaga

SEQ ID NO: 352 - DNA, 3716 bp, Artificial Sequence
  chemically treated genomic DNA (Homo sapiens)
tttgaggagaagaaaaggatagggtatatttttaggttttgtttgttagggtttttttaggtgtagaaaattggaattttttttgttagttatttatttatttgggtaggggtttgagtgtgaaatgatggttattattgttttttgaagtttatttttttaggttatgtatgttttttttagggattttggttgggttaggattattagtatatatatgtgtttagttatttagatagggttatgaaaggtatatttttttttggtgggttgtagtggtttatatttgtaattttagtgttttggaaggtagaggtaggaggattgtttgaggttaggagtttaagattagtttgggttatagagtgagattttgtatttataggaaaaaaaaaaaataataaagaaagaaagagagaaaaagaatattggtttttttaatgatgtgaggtaaaatttgttttatagtttgttagtgggttattttttgtggagtatgtattatgattttatgaaaaattgtttggtttgtggttttggtgttatgttgaagaagagattttttagagatttaaaaaaagaaatttattgaatttttaaattatttttttaaattttgattttaaaaaagtaagtatttaatttgatttttaaagtaaaaatatatttaaaaaattgaaatgttaataaaaatgtagattttgtggtggttaagagtttagaattttaattttattatttattagtaattttattttggataaatgtatatttttgtgttttagttttttatttgtagagatatagttaatatttaataatttttgattgttattggatatatgtgttttaatatattttttaatttttatgttttttttagtgtatgtttggagagagtttgaatattttttgatttttttttattgagtaaatttaaatatttgtaaaagatttatttatttttttaataaaaatttaatatggattaaggatttattttaaggtattatatattaaaaaagttaatattgatttaatattggtgtttatattatgatattatttgttaaatttgttttttaaataaagtttagaggtagtggaaaatattttatattttaggttagtgtttgttatgtttggttgattttaaattgttgagggttttttttaaaaatatagatttttgggatttatttgagatgattttgataattggttatatggatgagttatttagagatatttatttttaaggattaggattttgaagtttagaaaatgtttgttgtagttaatattatagttatattttataggtattgggtttatttttttgattgatatttttttgtggtttttttattttttttttttgtttggagaatttttatttattttttagagtttggtttaaagtggttttatttgtggggattttttttgttttatagtgagtgttttttgagtttttgttttttttagggtattttaagtttttaggggttgtttttgttgttttgttatttgttttaaagttggttgtattttgatggttaagggtagttaggtgtgttgttttttgtttaaatatatgaattttttttaggtttataggtggtttgggtggttggtgattgtttttttgagtgttgggtatttggttatggtgtttttgggttgtttaagaagtaagagttagagttttttaaggttgtttgttggtttttgggatgtggggttgattttttatatttgggtagtatgtggttgttattaagtggtggggtgggaggatggttttggggtgggattttgggttgggagaatgattttggggtggggtgtaaggtaggatggggtggggtttgtgggggttttggtggtaagtgagggttttgtgtaggtgttatgttttggtttgatttgttttttggaatggtggtagtttttgggaatgtagatttggttttagttggtttgtgttttttttgaggttttggttagtagtgatattgattgttgttttttgttgttgttggagaggtattggggtgattttggttttttttttttttggaagatttttttgttttttttggttgttggattgggattttgggtttttgttgggaatttatagttgatattaggatgtttagagttaggatttattttttattttatgggattagaagagatttgtgtgggtttgagttaggtttgggtttttttgggttttttggatttttattagtttgtgtttttgagtgttagagtatgttttttggtaaaggataatttttgatgtttttttttttttttttatatataaagtatgtgttttttataggtttgatgtgttgtggatatttaatagttattataaaatggagaattatgggtttttgtttttgggttttgagtttattagtgaaagtatagtttgaaatgaatatttaaaaagaaatttttttttttattttaagattaatggatttgaaaagtgtttggtttatatgattaaaattatttttttgtaaattataagtaataaggaaaataattttattttattttgtagtaatgtatttttattaaggtaattaagaaagttatgtataatgaaaaatatgtgaaattagttttagtttggtttaaatattattatgggatggagtttggtgttttattttttagtttttttttagttttttgattaggtattaagaatataatttgtgattttttgaaatattattaaagtggaaattaagagatttgatgaggatatttgatttatttggtagttgggtatttgtttttttgtttatttagagagtttaatttttaagaaggggttgagagggtttaaggtagttgagatataatgggatttattaggaatataatatagaagagaaaagttaagggaagttgggggtggagtgagggtttttgagtttagtaaattttttttttattgtagtttttagtggtgttaatatttaatatgtaaatttaaaggttttatgttgatttttttgtgaatggtttttgattttagatttagatagttatagagtaagatgataagtttgttaataagttttgttggggaggttttagtttaggttagagttgtgaagtgagaaataagtttagtttaaatagtgttgttgggatggatttttgtggttagggaaggggtatttaggagttagtgtggttattgatttagttttattaatggttttaggatttagaatgttataaataatggagtaagaattagatttgtgtgtttgggtaagtagaatgttttgagaatataattttttttttttttttttgtaagaataatttatttttttagttttgtatgagggttttttaatattgagtaagaatatatattattattgtgtgagatttagaaaattatttgagagagggttttaataaatgaaaatgaattaaggatgtttgtggagtttattgggtaatttatagagtttttgagtttttttaagtgaatattttataagaggggaaatagtagttattgtatagttttagagttgtttttgagtttttgtggtatgttatttgttttatttaagggttataaaggttataagtttagttttagaattttatgtttttttttaagtttttgttagtttgatttttttgaggataagtaaatggat

SEQ ID NO: 353 - DNA, 3432 bp, Artificial Sequence
  chemically treated genomic DNA (Homo sapiens)
ggaggatagaaatataaattaaagaatgatataaataattataaagttatagttgttaaaagaaaagtatatggtgttaagagaatgtgtaatataagatttatttatggaggtgagggaaagtttgtttattaaagaagttatgatttaatttatgaagattaggagttggttgggtgaagaaaaaaaggttagaggaaggaagtttatattggggaaggttttaagtataaagggtaggaggattatagaggtatatttatgaaatttggagaaggtttttagtaagtaaggagaagttaaatgaaagtttatgggagagttggaggtttgaagatatgtttaaggatttggtttttattttttttttattttaagagtagtgggaagttattaaatgattttaattagagggttggtataattagttttgtattttgaaaagttgaatttagtttttgtttgagaaattgagtgaaagagtttagaatggttgtggttgagggtgatttgtgggagatttttatataagttatggtagtggtatgggttggtggtagaagagggaatagggagaagatttggaatttaatttttttttattgataaagttattttagttttggtaaggtaattaattggtgggaaagaagatgtttagtttttttgattttattgtattttttgtatttttaatatgagtattgggaagtggtaaaatatttagaggtagtttgggtgttaggtggagtatgagttaaaattttaggatgaagtaaatgaatatttagaatgataggaaagatttgggagttgggtttgggggagggttatttatttttattttttggagattttggtataaatttttgtttttgtaattttttttttaggtaaaggaatttattaaatgaattgttagaagatttattgattagagggttgtatagaattatatttttgagagtgggaagtaggttgattatatagtttattatttaattaggatatatttgaaagagaaagggggttttattaatatttaaattataaaatatgtatattaggaatgttttgggtaaatttggttgttttagtaagaaaggaaatttgaaagtttatattgttttgtttttatgttattttgtttgtatatgagagggtaagtattttttttttttatttgtattaagggaataaaagtataagtatttaggtgatttttaatttatttttaattttatagtttttgttatattttatatattttgaaaattatattttttattattattattttgtgataggtgattatttataattatttattgatttagttttgggaagaggtggtgtaaaatgggatgttttatttaggtgtttattagaaatgtagaatttttgtttgttttttagatttattgaattagaatttgtatttttaaataagatttttaggtgattaatatgtatattaaaatttgagaaaaatttttagattttgatttaaagaaaaatattttataatttgatagtgtatgtatatatatatatgtatatagatataattgaagtataaatttaatgaagtagaatttattgttattattttatttgggaaagaaatgtgtttgtgatttaatagattggagtatttatttttggattttaatttgtaatttgaaaatgtatttttaaagtatttaggagtaatttgaagaaagttgaggggaggtggtagatgttttgatttattagggaaaatgtggatgttttttgttgttattttgtgaattgtgtgtatttagttatttttgagtaaatatttggagtgaggaatttttgagtggtgtgggagggtggtgaggggtagttgaaagttggttaaagtttttggaggggttggtttaggaaatatgattggtagttatgagagagttaggggttggatgttgaggagagggagaaggtttttgggtggagagaggttttgtttagttgttggtgaggagttttttgttttttttgtagtgttgagttgaagttgagtgagttatttgtgtgtatggagtgatgatatttttgtgtgtgtatttgtttgggataggagttggatttttgtgtagttttttttggttgttgggggtttttttgtgttttgttggtttttaggtttttttttggttggtgagtgggtgttatatttggtttgtatatttgtgttgttggtttggtgtggggtttggagagggtgtggtgtggaggtgtagttaggggtttgggaaggtgttgtttgttgtgttgggggtttggtttatgatgagtagtggggtttgttatgggttgggggttgtttaggggtttgtggttgttgtatattgttttgtggatgtgtattgttagtatgattttattgtatgtttagaagttgggtgagtggtttttagtttgggtttggtggggtgttgggggtttttttggggtttttgtttttttgttgtgtttgatagttgggtttggtaatttggtttttgggtggaaatgaggaaagttttttttgtgatatttatgtagtttgatttttgtagttgtagggattgtgagttttttttgaaaaagagaaggaaagtttagttgtaaggggtgtggggtatgtttggttttttttgtgtgagtaggaaaggtgttgtgttggttgtgtttgaggtgagtttttatttttggaaagggaagtttgagaagttggttatttgaaggtggttggggagtagtggtttggagtggtagtttgagttgttaaagtagttagtgtatttgggttattttgtttatggtgatgttgtgtgtttatttagttttttttgagttatttgtttaaaaggttagttttttagtttttagtttttggagatggttatgtttttttttaggttggttttttggtttggagtttttggaaataagttttaagaaaataattgatttttaaaagaaagttagttggttttattgatgttttggtatggatggatagggagtggagatgtttaggtgaaattgagaattttttattgaatgtttattgggtgttagaggttgtagattttgtttggaataagatagttttgtttttagggagttgatggttttatgtaattattgtttgttggaaattgaagggttaaaattttaattaggttatttatttgattgttgtttttgaaggtttttaaggaaaaaataaaaataaaaaaatatatatatatattatatatatataaatatatatataattatatatataaatatatataatattaatatatatatgtatgtaggaatgggggtttttaattatttgttatggaaagtgtaaaatttttgagattttaaaagttagattttttttttttggagatggagttttgtttt

SEQ ID NO: 354 - DNA, 3432 bp, Artificial Sequence
  chemically treated genomic DNA (Homo sapiens)
agagtgagattttgtttttaaaaaaaaaaaatttaatttttgaagttttagaggttttatattttttataataaatagttaagaatttttatttttgtatgtatatatatattaatattatatatatttatatatataattatatatatatttatatatatataatatatatatatatttttttatttttattttttttttaaaaatttttagagatagtgattaggtgggtagtttagttaggattttaattttttggtttttaataaatgataattgtatagaattattaattttttgaagataggattattttgttttaggtaaaatttatagtttttagtatttagtaggtatttagtgagggatttttggttttatttgagtatttttattttttatttatttatgttaaggtgttagtggagttagttaatttttttttggaaattgattatttttttgaaatttgtttttaaaaattttgggttaagaagttggtttgagggaaagtgtggttgtttttaggagttaaggattgaggagttggttttttgaatgggtggtttaaaaagagttgggtgggtatgtggtattgttatgggtggagtggtttaggtgtgttggttgttttggtagtttaggttgttgttttgggttgttgttttttggttgtttttagataattaattttttaaatttttttttttgggggtgggggtttgttttgaatgtggttaatataatgttttttttgtttgtataaaggggattaaatgtgttttgtgttttttgtaattgaatttttttttttttttttaagaaaaatttataatttttgtagttatgggagttgggttgtgtgagtgttgtgggggaaattttttttgtttttgtttgggggttgggttgttgggtttgattgttaagtgtagtggagaggtggggattttaggaagatttttggtgttttgttgagtttgggttggggattatttatttgatttttgaatgtgtggtgggattgtgttggtgatatgtgtttataggatgatgtgtagtggttataggtttttgagtagtttttgatttatggtagattttgttgtttgttatagattgagtttttagtgtagtggatggtgtttttttggatttttggttgtgtttttgtgttgtgttttttttggattttgtgttgggttggtagtgtagatgtgtgggttagatgtggtgtttgtttgttagttaggagggggtttggaggttggtgaggtgtggggaggtttttggtggttgagggaagttgtataggagtttggtttttgttttgagtgggtgtatgtgtgggggtgttgttgttttgtgtgtgtgagtgatttatttaattttaatttagtgttgtgggggaaataggaaattttttgttaatagttgggtaggatttttttttgtttgagagttttttttttttttttgatgtttagtttttagtttttttgtagttgttaattatgttttttagattagtttttttgagagttttggttgatttttagttgttttttattgtttttttatattatttaggagttttttgttttaagtatttatttaagaatgattaagtgtatatagtttataaagtaataatagaaaatgtttatgttttttttagtagattagaatatttgttgtttttttttagttttttttagattgtttttaggtgttttagagatgtgtttttaaattgtaagttgagatttaggagtgaatattttaatttattgagttgtgagtatattttttttttaaataaaatagtaatggtaaattttattttattaaatttgtgttttagttgtgtttatatgtatgtatgtatgtgtatatattgttaagttgtaaaatgtttttttttaggttgaagtttagaggttttttttaagttttaatgtatatattgattatttggaaattttatttaaaaatgtagattttaatttagtaggtttaggaggtaggtagagattttgtatttttaatgagtatttggatagagtgttttattttgtattgtttttttttgggattgagttagtgagtaattgtaaatgattatttattatgaagtgatagtggtgggaaatgtaatttttagaatgtatagagtatagtagaaattgtaaaattaaaagtgggttgggagttatttgaatgtttgtgtttttatttttttaatgtaggtgaagaaagagaatatttatttttttatgtgtaaatggggtaatatgggagtagaatagtataaatttttaaatttttttttttgttagggtaattagatttgtttaagatatttttggtgtatatgttttgtagtttaaatattaatagaatttttttttttttttagatatgttttgattggataataaattatgtgattaatttattttttatttttaaagatatgattttgtatagttttttggttagtagattttttagtaatttatttaatgaatttttttatttgagaggaagattgtagaggtaagggtttgtgttagggtttttagggaataaaggtaaatagtttttttttaaatttaatttttaaattttttttgttattttaagtgtttatttgttttattttggaattttaatttatgttttatttagtatttaagttgtttttggatgttttgttattttttagtatttatgttgaagatgtagaaagtgtagtgaaattaggagggttaggtatttttttttttattaattaattgttttgttaaagttggagtgattttgttaatggaggaagattgagttttaaattttttttttatttttttttttgttattagtttatgttattgttatggtttgtgtaggagttttttatgagttatttttagttatggttgttttgggtttttttatttagttttttaaatgagagttgaatttagttttttaaaatataaaattagttatattaattttttgattaaaattatttaatggttttttattgtttttgagataaagagaagataaaaattagatttttgaatgtgtttttaagtttttaatttttttgtaaatttttatttggtttttttttgtttattgaaagttttttttaaattttgtgaatatgtttttgtaatttttttattttttatgtttagagttttttttagtgtggattttttttttttgatttttttttttttatttagttaatttttggtttttgtggattgaattataatttttttgatgggtaagtttttttttatttttatgagtagattttgtattatatgtttttttggtattatatgttttttttttaatagttgtaattttataattatttgtgttattttttaatttatatttttatttttt

SEQ ID NO: 355 - DNA, 3077 bp, Artificial Sequence
  chemically treated genomic DNA (Homo sapiens)
ttatattgtgtatgtaatgtataagtatttattttgtttgtttggggttttgtttgtttttgttgagtttgatttttttatttgttgtttggtttttgttttatgttttagtgttattgagattaaggagagaatgaatttgttgttgattgggtagagtgagtgtgtggattgtggttattgtttgtttattatttgtgtgtatttgggttggtattgggtgaagaattgtgtgggtttgggatttgggggtttagagggagtgagtttttgtgtgggtgtttggtttgtaggttttgtaggtttaggggtgtgttttgtttttatttttattttggattttggtttttttttttagatagtggttttttttatttttggtttttgtaggttgttagtagtttgtgttaggttttgttggtgtttttagggttttttagattgtgtagattttgatatttttgtttggttttgggttttgggagttgagagttggttagggttttgtttgtatttttgggtgtttagttttgggtttgttttttgtggatgttttaatttttttggttgaatggatggtggtgtgtgtgtgttttattttggtggtgttggttttttttgttgttaaaattagatttaaatttttgtatgggatttgtttttgggtttttattttgtgtgtttagtaaatagtgggtgagttatgaagatgtgtgagttagttggattttttttgttaggtgtggatttgttgtggttagagaatttagtttgtgttagtttggtttgtttgtgaagttatgggttttattgatgtgattttttaagatgtgggggttattatgggtagaggatattggtttggagttagattatgggttttataagtattagattataagtagtgttgttattgagagttgtttggaatttgtttagtatgttgggttttttagttagggtttggtgtatgtggttgagggttttggaagttttgatggtttaggaggagtaggtgggtggggtggtgggtgttgttggttggtagagagttttggtttgatttagtgtaggtttggtgtgtgtagagaataattttaagtgtattgatgtttgtgagttttttttaaatattgaatgggatttagagtttgagtttataggtggtggttgggggagggagtagggtgttggttgttgtttgggagtgtttgtgttttgggtgatttttggaaggatgtggggtttaaattttggttggggttgggagagtagtttttagaggttttttgtgggattttttgttgggtgggattgtggttttataggagaagtgggtggtaagttttgtttggtggaaagtagttgtttttttttttttgggtttggggtggtgttttttatttttgttttttgttttttatttttgttttttgttggttatattttttgttttttggattttaagtgttttgtgtgttgaggagtttagtgttagtggtggtggttaggagagatttgggtgttaggaaagatgggttgtttgggggatagtagggagtttgggggaaatgtaggtgttgggtatagagttggtattggtgtttttagttttgttgaagattgtggttgggtttggtttgtgggaggggttttggtgttggatttgttttggttttgtgtgggtggttttgttgggttttgtaggagtgatgtgtgttaaaaggtggtgggaaggaggtggggtagagtgtgtttgggattttgatttggatgtggttagttggagaggtggagtgttgggaggagattttggttttgttgtgatttggtggtttgtgttgtttttttgtgtgttgggttaaaaaggtgttaatgtttgtggttgtttattttttgtggtgttttttttttttgtgtttatataatttgtttaggggttgggtagtttgttttgtttttttgtttgtgtatttgtttggaggtttgtgtgtttgtgaaggggatgtagtgaaattggggtttgtgttaggttagttgggatggatgttgatgtttggggttgtgatggttgtaggtaggaggtttagggttggggggtggtttggttttgtgggtgggggttggagtgtagtgttgggtaggtatttgggtttgtagttttgaagttgggaggtgaggggagagtgattggggatgagttgggataaggtgatataggggtttttttggagttggattggtttttgggatttggtgtttgtgagaggttggagtggttagagtttagtttgtgaggagatgtgggttttgtttttagtgttggttgtttttggtgttaaagatagttttgtaggggttttgggagggttttttttttgttgttttttttttattttgggttttgagggttgttgggagggtaattttgggaagaggttggggtgtggggtgtgggtgtaggtggaaattgttagtaagtttttttttgtttgtgtgttttttttgatttgtagggttgtgttaattttgaggttttagtttttttgaggagttagggttaggtttttttttggatagggagaaggatttgggtgggggttttgatttatggagttggttattaagtggttttgatggttttttgagggatagttttttgtggttttgagtttgtttgttgagggtttttggtttgtttttggagtggttttaggtagagaaagtttgtgaagaaatggtttgggttggtttggagggagatattttatgtttttttagtttttgggttgtttttttttgtagtttttgttttttttggggtttggatttggggagtgatgattatttttgtttagtttgtattttggtttggatgttaggagataagtttatgtagtatgtatatgtttgttatataaataggggatagatagatgatttttaattagtaagggtgtagggaaaagtaatgtattttaaatttttgattagaggttatttgtttttaaagatgttgttatttgtttatttattgtttggatatttggaaatggtttaggtttattaatataatg

SEQ ID NO: 356 - DNA, 3077 bp, Artificial Sequence
  chemically treated genomic DNA (Homo sapiens)
tattgtgttaatgagtttgagttatttttaaatgtttagatagtgaataaatagatggtagtatttttggaagtaaatgatttttggttagaagtttggggtgtattgtttttttttgtatttttgttggttgaagattgtttatttgttttttgtttatgtagtagatgtgtgtatattatatgggtttattttttagtgtttaggttaaaatataagttgagtaaaggtaattattgttttttaagtttaagttttgggaaaggtaggggttgtaggaggaggtggtttaggagttaagggggtgtgaggtgtttttttttaggttggtttgggttatttttttatgggttttttttatttgggattgttttggagataggttaggagtttttgatagataaatttagagttatagggagttgttttttgggaaattattgaaattgtttagtaattaattttatgggttaaggtttttgtttagatttttttttttgtttagaggggggtttggttttggttttttagggaagttgaggttttgggattggtatagttttgtaggttggagggagtgtgtgggtggggaggagtttgttggtgatttttatttgtatttgtgttttgtattttggtttttttttggggttatttttttaatggtttttggagtttggggtggagaggggatagtaggaggagggtttttttggaatttttgtggggttgtttttggtgttaaaggtggttggtgttgagggtaggatttgtgtttttttgtaggttagattttggttgttttagttttttgtgagtgttaagttttaggggttgatttaattttgagggagtttttgtgttgttttgttttagtttgtttttgattgttttttttttattttttagttttggagttgtgagtttaggtgtttgtttagtgttgtgttttagtttttgtttgtggagttgaattgttttttggttttgggttttttatttgtagttgttgtagttttgggtattggtgtttgttttggttggtttggtgtgggttttggttttgttgtgttttttttgtgggtgtgtgagtttttgggtgggtgtgtgggtggggaggtagggtgggttgtttggtttttaggtgggttatatgggtgtggggaggggaggtgttgtggggagtaggtggttgtgggtgttagtgtttttttagtttggtgtgtgggaaggtagtgtgggttattgagttgtggtggggttaaggtttttttttggtgttttgtttttttagttggttgtgtttaagttggggttttgggtgtgttttgttttgttttttttttgttgttttttggtgtgtgttgtttttgtagagtttggtgaggttgtttatgtagggttgaagtaggtttggtgttagggttttttttgtgggttagatttgattgtgatttttggtagagttggggatgttggtgttgattttgtgtttgatgtttgtgttttttttggattttttgttgttttttagatggtttattttttttgatatttgggttttttttggttgttgttattagtgttgggttttttggtgtgtggggtgtttggaatttaaggggtaggggatgtggttggtggggaataggggtgaggggtggggaataggggtgaggggtgttgttttaggtttaggaggaggggaatggttgttttttgttaagtagggtttgttatttattttttttgtggagttatggttttgtttggtagaggattttgtggagagtttttgggggttgtttttttaattttagttggagtttgggttttatgtttttttaggggttatttaggatgtgaatatttttgggtggtggttagtattttgtttttttttttggttgttgtttgtgggtttgggttttggattttgtttggtgtttggaaggagtttgtgggtgttggtgtgtttggagttgttttttgtgtgtattagatttgtgttaggttaggttgaagttttttattggttagtgatatttgttgttttgtttgtttgttttttttaggttattggggtttttagggtttttgattatgtatattaggttttggttaggggatttgatatgttgggtgagttttgagtggtttttagtggtggtgttgtttatggtttgatgtttatggggtttgtgatttggttttgaattgatgttttttgtttatggtgatttttatgttttggaaagttgtgttagtgaagtttgtggttttgtgagtgagttgggttggtgtagattgggttttttggttgtagtgggtttgtgtttgatggggagggtttggttgatttgtatatttttatggtttatttattgtttgttgggtgtatggggtggggatttaaagatgaattttatgtagaggtttgggtttagttttggtaatagaaaaggttggtattgttggagtaggatgtgtgtgtattattatttatttggttggggaggttggggtgtttgtggggagtagatttgaggttgggtgtttggaggtatgagtaggattttggttggtttttagtttttagaatttagggttaggtggggatgttagggtttgtgtgatttggggggttttagaggtgttggtggggtttggtgtggattattagtggtttgtgggagttaggggtggagggggttgttgtttagggaagaggattggggtttggagtgggggtgagaatgaggtatgtttttgagtttgtgaaatttgtggattgagtgtttgtgtaggagtttgttttttttgggtttttaggttttagatttgtatgattttttgtttggtgttagtttagatgtgtgtgggtgatgaatgggtggtggttgtgatttatgtgtttgttttgtttagttagtggtaaatttgttttttttttgattttagtggtattggagtgtgaggtaagggttaggtggtaggtagaggggttggatttagtaaaagtaaataaaattttaagtaaatgaaataaatatttatatattatatatatgatataa

SEQ ID NO: 357 - DNA, 8913 bp, Artificial Sequence
  chemically treated genomic DNA (Homo sapiens)
gagttttagttaagaaaaatgatttttaagtagaaataataggtggggagaaggaagggagatatagggatttggggggtttttagggtaattggtagtgaattttgttttgagagttttttttttatttaaaaaattaaatgtgtgagttttgtgaaaggtttagggatagattgtgtgggagaggattgagtagagagtgtgggggtagtgttttgtagaatttttttttttttaataataattttaaaagtttttgagtggagatgatgtaaagttaagtagtaaaggtggtttgggaggtaagtggagggtttaagtgttgtatttttatttttagggttttttgtgtttatgggatgtgtatttttaagaagtgtgttttttgagtaagttttgggtttgtatatattttgggtttgtagttagaatttaatggtgataatgtttatgtaatgtaagttaaaaattaaagtgtaaaaaattattatgttatttattgaaatgttattttttgttaaattgtaattattttgttttatataagtttggttggaaagtttgtagttttagtttgggttagttaggtataggaggttggattgtaattggttgttttttttttgttgtgtttggttgttttatgttgtgttgttgttgttgttttttggtgtttttgggattttatatgtatttttgaaatatgttttgttttggtttttggtttttttttttgtttaggggttgttttttaatagatattgatttttttagaagatttaaaaattaaattaaaatattttttatttgttttaaatatttgttttggggtgtgggggttgttaaatagagattagatgaagggagttagatttagtgaagttttttgagtttttaaagatttgaatattaatttgtgtttgtgggttgatggaggttttttttattttattttttggtttttttaattggtttttgttttttggttaattattgagtaattagaatggtatttttgattagggttataggtagtgtttggtggagtggttttaggagttatttgttttttgttgggttttgtatttaaatttttttttttattttttttttttaaattgggtgttaggatgttttggttggaatatatgtaggttttgggtgtttgtttaagggttttttttttttttaaattagttgttgtttttttggtttaattgtagaagaattagatattttttattggaaagggaaattaagtgttgttgattttaattttaggtaggtggtaattgttttttgtttggtgtaaattttattaagtaaataattattagttgattgaaatatgtttggtttataattggtgtaatttttggttatttaattgagggatgtttgtttttagttttgatttttggaatttataaagggttatttttttttttagtgattttaagattatggttatttttttatttgatagttttagaagtaagagttagatttaagggtgtaaagtaagggtatatgtttttttgaagtttgattgagttttttttgtgtttttttgaagtttttgtttttttggagtttatttgtttttttttttaaattatttttttagattaataattttatttttatttttattgtatttgattttgtttggatttattgtttatttgaatggattttttagtgagatgaggtttttatattggtgaaggttaagaaggggaggtggggggagggttgtgttatattggttagttgagagtgtgtgttgggttgaagaggagggtgtttttgagagggatgtttttttggatttgtttttattttagttgtgagggtgtttttaaggagtagtgtgtgttgtttggttgggtttgggttgttgagtgaatggagtggttgagttttttggtttttttttttttttgtgttgttggttttttttatttgagttttgggaagttgagggtagttaggtagttggggtaaggagtttaaggtagtgtttatatttgggggttttttgtaatttgattgtttgtttgtttttttattttttgtttttttttttatttatttatttatttatttatttatttagagttgggatggtagtttaggtgtttgggttttgttgtttttttgttgtgattttggatttttttttgttgtaggatttggtttttatgtgtgttttggagttggtgttttagtatatgttttgttttgggtttgggtgtttatagtagttagagtagtagggagtttgggatttgggtggtatttgggttaagttaggtgttgttgaggttagtgttgaatgtttttagggttggaggagttgtggggtgtttgggtttgagttgtagtaaatgggttttgatgtgtgggatttgaatgtgttgttgtttgttgttttttttttgggtggtggtggtggttgtgttttgtttgtgagtggtgtggtgtagtgggtgttggtgttggattttgtgtttttgggtgttttggtttatgggttgttgggtggttttgtgttgttattggttttgttgttatttttgttgttgttgttttatttttttattaaataggagttgagttggggtggtgtggagttgtatgaggagtagtgtttgagtgtttttattgtttatttttttggttagtttattggtatagttggagtttgttgttatgggttttttggtttttttttgtttagttaggtgttatttggttaggttaggatgttttttaatgtgttttatttgtttagttgttttgagagttagtttgttatttgtaattagggtaagtaggttggggagtgttttttatgtgtggggtagtggtgttagggattttttgttttaggatattttttttttttattttttttgattgtagtttttatttagttgttttttaagggttgtgaggatagtggaagtggtggttggggaggaggttggagagtgggagtgtatgtaggtattggtttttgatattttttaaagttaggtagagttaggagtttgattgtttgtaagagttgggagggtgtttggggttttttagagtttgagagattttgggattgttagtttttatgggagtggaattaggagattggtgtagtgtttggttttgttttggggagagttttgttaattaaggaaatgttaaattgttattaagtgtagtgttttttagatgtttggattttggatttggagtgggattagtgtgggggtgagtgtttgtgttgtgttgtttttgtagtgttaaaatgtttaggagtatttttagtttttataatatggtgttggtatatatttaggtgtatattaagtattgtagagaattagaatgagtatatgtatttttagtaattaaatggttttttggaatagtgttgtgtttgtggatagtttttgtgtatggtaatatagaagtggatttttattgggttttgtttaggtggtggttatgtaggttttggggatggaagagaatttgatttatttgagtttaagttatgtgggattaggttttattgtaggtagtggaaggaggtatgagttttggttttttttttagtgtatttggggtgtttttttattttgtaaatgtggggtttagttgggatagtatttttttaagatttggggttagaataaggatagggttatttgttgtgtttagttaggatataaggagggaatttggtatatgataagtattaggttggttttttattttgtgttgatgtttgtttattttttttttgtttgggtggtgtggatttgaatttgtggagtttttgtagtttgttttttttatttatttttagtggatttttatgttattgagaatttaagttagtttggtttgatttggtaatttagtaaatgttttattaatataatggtggatgttttttttggagtaaaattatttgagggtttagggattgggatgtttttggaatgtgtgggaagtagagtgtattttttgtaggaggtatttttgtttaaggtttgggagaagggttttgtttttgttgtttgtttttatttgtgttttttaaatgtgtgtttttaggttgtttttattttagtttaattaggagtatttggtttttgtgaagttttggagaaattgaaattgtttttttttttgggagaatttgggattattgttttgtggaggaattgtaagtagatttaagggttgtttttattttatgtttttagttagtgaaattagtgttttgtatttaaggggtgttgggataatttattggttgttgaggtttgtgttttttgattagattgtgttatttttgtttagtaggttggtgttatttttggggagtttttaggttttagtgtttttgtttataagaggatagttgagatgggtaatttggagattgggtttggtttgaagttatattttatagatgtagaagtgttatttattatttttttggggttttaaatatggaatttggtaatttatttaaatatttgtgattgagaaataatgaatttgagagtattgtttgtatgtgtgttatttggaggtggttgagaaattattgaatttatgtttttggggtataaaatattattatgttattatttttttagtatttttaggggatttttgaaatttgggttttgttgttttgtttgggttttttgtttagttttttttagggtaggtttggtgtttgggattttattatatgttgtggggggtgggattgtgggttttgtagttagtaggtattatatttttggaaaatatttggatttttttgtaatatataggtgtggttgttatggagaaaaagttaaaaggggattaggattagtaggtgaatgtattttttttttttattttggagaaaaagtttaatggagagagggttttagatttaagttatatagtttggaagtattatttttaggtttaagttttgttttgtagtgaaaatagatgggtttattttatttagtttttgaggtttattgggtagtttggatgtgagaagtgttttggttgttattttggagtgggtaagggtggtttttgagattttgggtttattttttggatttttagggtttttgttgtttttttaggaatgtagggtttggtttaagatttgggttgtgagaggtaagggtattaatttttaaaaatgtggaaatggttattagagtgttaaggttaaattttaggggagaggaattaaggttgtttttggatttttagggtagtttagttatggtgtataggtaggggtaattgttggtatttatttataattgtttaaaattttataagtatgtttatattttaaatttttaaatattatattttgtattttaattttgtaaatattaatttagtaaatattaattgtttatttggttaggtattgggttttgaatattaattaagataatggttttgagaatttttgtaagaagtttattagttaattttggagaggttttttgttttggatgaggaaatttaggttttatgagattaggtggtagaggtgggatttgaatttagattatgttagggtgtttttattttttttttagggattttggttttattgttgagatggattttttttggtttgtgggaggggtattaaatttttagtttatgtgtgggggttgatgggtttgtgagggtagatgtggggtgaggatttgagtagttttagattagatgtaaggtttaaggaggaggggaaaaaagtttgtttgggttggatgtggtggtttgaggtggttggattatttgaggttaggagtttgagattagtttggttaatatggtgaaattttgtttttattgaaaatataaaaaaaaaaattggttgggtttggtgatgggtgtttataattttagttatttgggaggttgaggtataagaattgtttgaatttgggaggttgaggttgaagtgagttgagattgtgttattgtattgtagtttgggtgatagagtgaaattttgttttggaaaaaaaaaaaaaaaaaagaggttgtttgttagtttattgattttgtagttttgtaggtttgtagaattttaaggtatgattaggtttgggattattaggttattttagggttaggtgtggaggtttgtgatgtttgagggttaaaggtttttttttttggttatataggagagggtattttgttgggggataggttttttttaattatagtgtagttgtagttattgtttttagttttttgagtatttttttggttgagtttgttgtttattttattttttagtttttatggtttggttaggttaggtggtttttggtttttttgtagttgttggtgggggaggagggtatagagtgtgttttgttttttagtgtatggttaaggttgtgttttttttttgggttgggattaattgtgggaaaggtgttattttggttatttgattttttttttttaaggtttgtataaggagtttttgaatatgttgttttttttagttggtagttttattttttttggtttttgtttttgtattttttgtgttaggttaagtgttgggtttagggatagtgtgttttaattaaatttgtgtttgataagtttttaattaaaagagatttttttttgttttgtaggtgtttttattattgttttttttggggggatttgaaggagagggtttgaggttggtttttgtttgttgaggtttgtgtgtttggtttgggaggaggtttaggagggtttgtgggttatgggtatttttgggtttgagttttggggtgtggatggatgttttgagagtgggtgttgtgatttgggatttatggtttttgttgggtatggatagttgtggagtagggttttgaggattgtgtagtgttttgggtttttgtttatttttgggtttaggaatggagaagggtttgtttagagaaaatttttttgtagtttttattttgtttttttttttttttttttttttttttttttttttttttttttttttttttttttttttgtgtttgtttttttttttttttttttttttttagtgtttttttagaaatttggtttttattttgggtaatagtgggtgttttgagttaaattttgtttgtaagtttatttataggttttaaagaaggttaggttttaggttttaaaaggaagtttgtggaagtttaaatgtgtttgtttatgtaggagagttaatggggttgggggttatttttgtttatttagtaggagagaaatggaggtttttgaggttatatgataaaagttagtggttttttaaatttttagtgtgtggtgttgagtagtgtgtgagatttaagtttggatttgtattatttgggagttaggatttgtttttttttttttttttttgtattttgttatattattttttaggtttatgtttttgttgttttagagaagttttttttttttttttttttttttttttttttttgggtggggggtggtggtgtgtgtgtatgagtgtttgtgtgtgttttgaaaatggaggtaatgatgttttgggttttgtttattggttgagttttgtttaagtttttggaggtattttggttaaatagtgtaagagtgggagaatgggtgttgtttgatttaatttatttttgagaattttgtgaagtttggagatttagggtagttttgggttaggaggatttgaggttgttggggtggttttgttaggattttataggagtagttttttttagttattgtgtttggattttaggttatagattttggaatttgtagaggaatgagattttatttttgggttttggggttaatgatgtatttttagttgaaggatttttttttttagaggtagtaatagttttttagaagtttgtggggtataagtttaaagtaatttaataataaaaattataaaagattatgttttttaattgaggttttatgtttttttttttattttgggggggggggggaatgttaggatttttttagggggaaattgaggtaaaggattgaagtattattatggagggaaagggagatatagtgttaggtatattttaaaggaaattggttgtttagtttggggagtgaggaagttggtttttatagtagtggttagggttggatttttgggtgtaaggtgggttttataggggggaggaggaggagagtgtagggttgttatttgaaggtttaattggaaggggtttttgtttttttttttattagtttttttttgggtgttatggtgttaggttgggtagttttagatagataatattatttggtaattattttttttatttttaagattaggttatttaattggttttgagtaattaatgaaagttggtgtgtgggtttttgatttatagtttggagttaatgtggggttagtttagtagatttattttgtttgtttgtgttgtttttgtggaagagttgtagtttatttttggggggtgaataattttttttgttgattaggtaatgagttttatatttaatttgttaggggtttgttgtagaagtggtagagattgtagaagattgtggtataaataaattgggaaaaagtgaggtgggggttttagttagaaaaggatggagaagtttgttttaaggttatatttagggatttgggttgtttttttgttgaaagttttggaggtttgtggggttggatttttttttgttgggggtttgaatgtggggtttagtgtatattttttttgtttgtggttggtttagatttattgttttgttttgtgagagtattgttgatattgtgtttttttttgttgtttttgtagg

SEQ ID NO: 358 - DNA, 8913 bp, Artificial Sequence
  chemically treated genomic DNA (Homo sapiens)
tttgtgggagtggtggagagaagtatagtgttagtggtgtttttgtaagatggggtagtgggtttgaattagttatgggtggggggggtgtgtgttgaattttgtatttggatttttagtggaggagaatttagttttataagtttttaggatttttggtaggaagatggtttaagtttttggatgtgattttgggataggtttttttatttttttttgattaaaatttttattttgtttttttttaatttatttatgttgtagttttttatggtttttgttgtttttgtagtgaatttttggtaaattaagtataaaatttgttgtttgattgatagagaaggttgtttattttttaaaaataaattgtagtttttttgtaggagtagtgtgggtaagtgaaatgaatttgttgggttaattttgtgttgattttgagttgtaaattaggggtttgtgtattaatttttattaattatttggagttagttaaatggtttggttttaaaaatgggaagagtaattattgagtaatgttatttgtttggggttatttgatttgatattatgatatttaagggaaagttggtgagggggaaaataagggttttttttagttgggtttttagatggtgattttgtgttttttttttttttttttttatgggatttattttgtgtttaggggtttgattttgattattgttgtaggagttaatttttttattttttaggttggataattaattttttttagagtgtgtttgatattgtatttttttttttttttatggtagtgttttggttttttgttttagtttttttttagggaaattttagtatttttttttttttttaaagtgagaaaaagagtgtggagttttagttggaaaatatagttttttataatttttgttattaaattgttttaaatttatattttataagtttttggaaagttgttgttgtttttggggaaaaggattttttggttaaagatatgttattggttttggaatttaaggatggggttttatttttttataagttttggagtttgtggtttgaagtttagatataatggttaaggagagttgtttttatgggattttggtagggttattttagtagttttagatttttttggtttaggattgttttgggtttttaaattttataaaatttttaggagtaaattgggttaaatagtatttatttttttatttttgtattatttgattaaagtgtttttaaagatttaagtaggatttagttgatgagtaggatttagggtattgttatttttatttttgaaatatatatggatgtttatgtatatatattattattttttgtttagaaaaaaaaaaaaagaaaaagaaaaaaaaaaagtttttttggggtaatagaggtatgagtttggagggtggtgtggtagagtgtaagggagggaaggagggggtaaattttaatttttggatagtataggtttaggtttaagttttatatattgtttagtattatatattggggatttgagaagttattagtttttattatatgattttgagggtttttattttttttttgttaagtgggtaaagataatttttggttttgttagtttttttgtatgggtgagtatgtttgggtttttatagatttttttttgaaatttgaggtttggttttttttgaggtttatagatgagtttataaatgaaatttggtttagggtatttattattgtttggagtgaaggttgaatttttgaaaggatattaaaaagagagagagagaaagagagatagatatagagagagagagagagagggagggagagagagagagagagagagagagagagagagagatgaaatagaagttatgaagaagttttttttagatgaatttttttttatttttgagtttaggagtaggtagggatttagggtattgtataatttttagagttttgttttgtaattgtttgtgtttggtgagggttgtgggttttgagttgtggtatttatttttgagatgtttgtttgtattttagaatttgggtttaaggatgtttgtggtttgtgagtttttttaggtttttttttagattggatatgtagattttggtgggtaaagattggttttaaatttttttttttaggtttttttgggaggggtagtggtgaaagtgtttgtggagtggagggaggttttttttaattagaagtttattggatatgggtttgattagagtgtgttgtttttgggtttagtgtttggtttggtgtggagagtgtgggggtaggggttaggggaggtaaagttgttggttggaaggagtagtgtgtttaaaggttttttgtataggttttggagggagagaattgagtggttaaggtagtgttttttttatggttagttttggtttgggaggggagtgtaattttgattgtgtgttaagaggtgagatgtgttttgtgttttttttttttgttggtggttgtagagaagttgggaattgtttggtttggttgggttgtgagagttgaggggtgaaatggatagtaggtttagttaggaaggtgtttagaaggttgaaaatgatgattgtagttgtattgtgattggggaaaatttgttttttaataaaatatttttttttgtgtgattggaagagggagtttttggtttttgggtgttgtaggtttttgtatttgattttagggtggtttgatgattttaggtttaattatgttttagggttttgtgagtttgtggggttgtgggattagtggattagtaggtaattttttttttttttttttttttttgagatggagttttgttttgttgtttaggttgtagtgtagtggtgtgattttagtttattttaattttagttttttgggtttaaatgatttttgtgttttagttttttgagtagttgggattataggtgtttgttattaagtttggttaatttttttttttgtatttttagtagagatagggttttattgtgttggttaggttggttttaaatttttgattttaggtgatttaattgttttgagttattgtgtttggtttaagtaagtttttttttttttttttttaagttttgtatttagtttggggttatttaagtttttattttatatttgtttttataaatttgttaatttttatatatggattaagagtttggtgttttttttgtaggttagaagaaatttattttaatggtggggttaagatttttggaaaaggagtagaaatattttagtatggtttgggtttaaattttatttttgttatttaattttatagaatttggatttttttatttaaaataaggggtttttttaggattagttggtgagttttttgtaaaggtttttgaggttattgttttaattaatatttagaatttagtgtttgattaagtaggtgattgatgtttgttaaattaatgtttataagattaggatgtaagatataatatttaagaatttaaaatatgaatatgtttgtgaagttttgggtggttgtgagtgggtattaataattgtttttgtttgtgtattatggttagattgttttagggatttagagatggttttgattttttttttttggggtttggttttggtgttttgatggttatttttatatttttgagagttgatgtttttgttttttatagtttaagttttgggttaggttttgtatttttggggaagtagtaggaattttggaaatttaaagaataaatttagaattttgagggttatttttgtttattttaggatagtagttggagtgttttttatatttaagttgtttaatgagttttaagggttgggtaagatggatttatttgtttttattgtaagataaaatttaaatttggagatggtgtttttaggttatatgatttgaatttagggttttttttttattgggttttttttttagggtggagaagaaggatatatttatttattagttttggtttttttttaattttttttttatggtagttatgtttgtatattatagaagaatttagatattttttagaagtgtaatgtttgttggttgtaaaatttatagttttattttttatgatatgtgataagattttaggtattagatttgttttgaaaagggttggataagggatttaaatgaagtgatagaatttaggttttaaaaattttttagaagtattaaaaagataatggtgtagtagtattttgtgttttaggggtatggatttgatggttttttaattgtttttaaatagtatatatgtagatagtgtttttggatttattgttttttagttatagatgtttagatgggttgttgagttttatatttaaagttttaagagggtggtgggtagtgtttttgtatttatggagtataattttaagttggatttaatttttaggttgtttattttagttgtttttttatagatggggatattgagatttagaaattttttaaaagtaatattagtttgttaaataaaggtggtgtgatttgattaaagaatataagttttagtgattagtaagttgttttaatgttttttgagtataaaatattaattttattaattaaaagtatagagtggaggtaatttttgggtttgtttgtggtttttttataggatagtgattttagatttttttgaagaaaagggtggttttgatttttttaaggttttgtgggggttgggtgtttttggttaggttaaggtaggagtggtttgaagatgtgtgtttagaaggtgtgggtgaaggtgggtaataagggtagagttttttttttgagttttgggtgaaggtattttttgtaaaagatatattttgttttttatgtattttaaaaatattttggtttttaggtttttgagtaattttgttttaggaaaagtatttgttattgtattagtaaagtgtttattaaattattgaattaaattgaattggtttaggtttttaatagtgtggaaatttattgaaaataaatgaagagggtaaattataggggttttgtaggtttgggtttgtgttgtttaggtgaaagagaggtgggtgggtattggtgtgggatgagaaattaatttgatatttattgtgtgttgagttttttttttgtattttgattaagtatagtgaataattttgtttttgttttaattttaggttttgaagaaatattgttttagttgagttttgtgtttataagatgaagaggtgttttagatgtgttgaaagaaaggttaaagtttgtgtttttttttattgtttgtggtagaatttggttttgtatagtttggatttggataagttaagtttttttttatttttagaatttgtgtggttgttgtttgagtgaagtttagtgaagatttatttttgtattattatatgtgggagttatttatggatatgatgttgttttagaaagttatttagttattggaggtgtatgtgtttattttagttttttatgatatttaatgtgtatttaagtgtgtgttaatattgtattataagggttggaggtgtttttggatattttagtgttgtggaggtagtatagtataggtgtttatttttgtgttggttttattttgaatttagagtttagatgtttgaaaagtgttatgtttggtgataatttggtgtttttttaattaataaaattttttttaaggtagagttagatattgtgttggttttttggttttatttttgtggggattagtagttttggaattttttggattttaaggggttttagatgtttttttggtttttgtgaatagttaggtttttagttttgtttggttttggaggatgttgggggttagtgtttgtgtgtatttttattttttggttttttttttagttgttgtttttgttatttttatggtttttgggaagtagttgggtaagagttgtggttaaaaggggtaggagaggggggtgttttagagtggagagtttttggtgttattgttttgtgtgtagggggtgttttttggtttatttattttgattgtgaatagtgggttggtttttgaggtagttgggtaggtagggtgtgttaggaaatattttggtttggttggatgatgtttggttgggtggaggaggattgaagggtttgtagtgataggttttggttgtgttagtgaattggttggaaaagtggatagtgaaggtgtttaggtattgttttttgtgtggttttgtgttgttttagtttggtttttgtttgatgaaggagtgaggtggtggtggtgggggtggtggtggagttggtggtggtgtggggttgtttaatgatttgtaagttgaagtgtttgggggtgtaaagtttagtattggtgtttattgtgttgtgttgtttataggtagggtatagttgttgttgttatttagggaggggatggtgggtagtagtgtgtttaggttttgtatgttggagtttatttgttgtggtttagatttggatgttttgtggtttttttggttttggagatgtttagtgttggttttggtggtgtttaatttggtttagatgttgtttgggttttggattttttgttgttttggttgttgtaggtatttaggtttggagtggagtgtgtgttgagatgttggttttgggatatatgtggaagttgggttttgtagtaagaggaagtttaggattgtggtgaggagatggtggggtttgggtgtttgggttgttgttttggttttgggtgggtgggtgggtgaatgagtaggtgggagggagggtgggaagtgggggagtggataggtggttgggttgtggagagtttttgggtgtgggtgttgttttgaattttttattttagttgtttggttgtttttagttttttaaagtttaaataagaggggttggtggtgtggggaagaggaggagttaggaggtttggttgttttatttatttagtagtttaagtttggttaggtagtgtgtgttgttttttgggggtgtttttgtagttggggtgagggtgggtttgagggagtgttttttttggagatatttttttttttaatttaatatgtgtttttagttggttggtgtggtataattttttttttattttttttttttggtttttgttagtgtgggagttttgttttattggagagtttgtttaggtaagtagtgagtttgggtagggttgaatgtggtgggagtagagatggggttgttaatttaaaagagtggtttggagggaggggtaggtaggttttaagagggtgggaattttaggaaagtgtagaaagaatttagttaagttttaaagaagtgtatatttttgttttgtatttttgagtttggtttttgtttttagaattgttgggtaggggagtggttatgattttggggttattggggaaagaggtggttttttgtgggttttagaggttgggattgaaagtgaatgttttttagttgggtggttgggagttgtattagttataagttgggtgtattttgattggttagtagttgtttatttggtgaggtttgtgttaggtggaaggtggttgttgtttatttaaaattggagttagtagtatttagtttttttttttagtgaggaatatttaatttttttatggttaagttgggaaaatagtggttagtttaggagggaagaaaatttttgggtaaatgtttaaagtttgtgtatattttggttggagtattttggtgtttagtttggggaggaggggtgaaggggagggtttggatatgaagtttggtagggagtgggtaatttttggagttattttgttgagtattgtttgtggttttggttgaggatattattttggttgtttagtgattgattaggaggtggaagttagttaaggggattaaggagtggagtagggagaatttttattggtttatgggtgtgagttagtgtttgaatttttgggagtttgaagagttttgttaaatttgattttttttgtttagtttttgtttggtagtttttgtgttttagagtaggtgtttggggtgggtagggggtgttttggtttggtttttggattttttaaaggagttagtatttattgggaaataatttttaggtaaggagaagaattgggggttggagtggagtgtgttttagaggtgtgtataaaattttaggggtgttaggaggtagtagtgatggtgtagtgtgggatggttaggtgtgatgggagggaagtaattggttgtagtttggttttttgtatttggttggtttgggttggggttgtaagttttttagttaaatttatgtgaagtaaagtagttgtagtttgataaagaatggtgttttaataaatgatatagtaattttttatgttttggtttttagtttgtattgtataaatgttgttgttattaaattttggttgtggatttgaagtgtgtgtgggtttaggatttatttgaagggtgtattttttgggaatgtgtattttgtaggtgtaggagattttgagggtaaagatgtggtatttgagttttttgtttgttttttaggttatttttgttgtttgattttgtgttgtttttatttagaagtttttaaaattattattaagaaaagaaagattttataagatattgtttttatgttttttgtttagtttttttttatatgatttatttttaaattttttgtggggtttgtgtgtttggttttttgagtggagaaaggatttttgagataaaatttattgttagttgttttaagaattttttagatttttgtattttttttttttttttttgtttattatttttatttggaagttgttttttttaattaggattt

SEQ ID NO: 359 - DNA, 2501 bp, Artificial Sequence
  chemically treated genomic DNA (Homo sapiens)
gtaaaaggtttttgtaaagatgaaggtttttatatttgtgagggaaataataataataaaggtgtttggaagggttgtttatttgtatttatgggtttttttttagaattttgggaatttttttttttagagttttgtaggtgtttagggttagggttggaaaggtttttataaatgttaatttgtgagtattttatgggttgttttttgatttttagtatttttttttttaattagatttaatggtgaggtgaagaggtgggggtgatggagaatggtatttttagtttggagaaaaaagtagggagaggtggggaagtttttttattttaattttagggttaggtttttttttttttaaataagtttaaggaatgttttttaaggtaaaattttattttattgtgtatttggttgtgaagggggttgtttaggagattagggttgtttttggagagtttggagggtaggggtaataatgtttgattttttgtaaataaatatatttgtaagaaaagttagattagagtgaagtaaagttaggatttgatggtggtgggaagggaaggggttaatgttgttgttggatagaggggtgttattttttttagaagaatagtatgttgtggttattattataataatagttgatataattattatgggttggggatttataagagtttttataatttttaggtaggaggtattatgaattttattttataattgaggaaattgaggtataaagaaatgaagtagtgatagtagtttttttttttttttttaatagtttggaattaagttgtttgagttgaggttgggttttaggaggtgtggatagtatttttattttggtaaattagatttgtttgtttataattggggagaatggtggttttgaaaaggttaatttgggagttttggggatggttgtagggaatgtatgtttattttttttaggaagtagagttaggttgtttttttttttgtagtggtgaggatgtgtggatagttttgtgggggtggtgggagatttgtggagtggttgtattttaggtttgtgttaaggttgggtagttttgttttttgtttagtttttgtgaggtgttgtttttggttgaagaaattattgtggtgttatttttgtagtttgtatttatttatttatttatttttaaataaggggggtgtttttttttttttaatttgaaattggaaatatttagaggttttgtttttaagggggtgtgttttttttttgttattttgtatttttggattagtttttttttgtaattatataggagtaatttttttgtaaggttttgtttaatgttggttttgtgtttagttgtataatatgtagttaaagtgggggttgggttagaagtattggttttttttttttaatatatatttttggagttttttgtaattttttttttttttaatgataagtaattgttaggtttgtagggtgggtgttgtattgtattgttttgtgtgtagttggtttttagagtgtagttggtgtaagtttgggggtttaaaagggtgggaggagtatattttgggttttttagttttgtagttttttttttgtaaagaaaagtaagtggtttttggtgtgaaagttttggtgttttttttgatttttatggaaattaggagggtggggtaaagttgtttttttttttttttttttttttttttgtttgtgttatagtttttttttttttttgttttttgggtgtgttagattttttagttaataatattttttgagttttaaagtgtaggttgtgatagttatttgtttggatgtgttgggtggatgtggggggtttttgggaattgtgttggagttgagtaagtgttagttaggtgtaagtgtgtatagattgtagttatttgaggatatttttgtttttttggtttatttggagatatttgtgtagaattgtttttggattttttgtagttggtgggaggtaaggagtagggtttgtaaattgtttggtgtttagggaagtgatgagtgttggggtaaggtaagttttggatgggattgtgatgtgtgtattgggtgttttaatatgtttgggggattgtttttgtttttgaaataaaattatttttgggtttttttagaaaagttagttttagttttgaaggtattttggttagaggagatttgttttaatttttttgtagtttttattggggggagtaatggtttttgtgaaaagaaatttttttggttttagaagatttgtttgtgtttgagttgttggagagttggtgtgtttttattttaggttggggtttttttttaaagggtgtttttggaggaagaagagggggggattaggtagggtgaggttgttgtggttgtaatttgggttatggttgttttagtttggaggagaggtggtttttttggtgattttttttgtgtgggtgtttttgttatttttgggaataggggtttagttttt

SEQ ID NO: 360 - DNA, 2501 bp, Artificial Sequence
  chemically treated genomic DNA (Homo sapiens)
agaggttgagtttttgtttttgggaatggtaggggtgtttgtgtgaggagggttgttgggagagttgttttttttttaagttggagtagttgtgatttagattgtgattgtggtggttttgttttgtttaattttttttttttttttttttaggggtattttttggagaagaattttagtttggggtggggatgtattggttttttgatagtttaaatatagatagattttttagagttgagggaatttttttttgtagaagttattattttttttggtaagggttgtaaaaggattagggtgggttttttttagttaggatgtttttggggttggaattggtttttttgggaaaatttagagatggttttgttttggaagtagaaatagttttttgggtatattagggtgtttggtgtgtatgttgtaattttgtttagggtttgttttgttttggtgtttgttgtttttttgggtgttgggtggtttgtaagttttgttttttattttttgttgattgtaggggatttggaggtgattttgtgtgggtgtttttgggtgggttgggggggtgggggtgtttttggatggttatagtttgtgtgtgtttgtgtttggttagtgtttgtttggttttaatatagtttttaggagttttttgtatttatttagtgtgtttagatagatgattgttatagtttgtgttttgaagtttgggggatattattaattgaaaaatttgatatatttggggggtggggagagaagggggttgtggtgtagataagggggagggagaaaggagaggaaagtggttttattttgtttttttgatttttataaaaattaggggaggtgttaaggtttttgtgttaaaagttatttgtttttttttgtagagagaaggttgtaaagttgggaagtttagggtgtgttttttttgtttttttggatttttgggtttgtattggttgtattttgagaattagttgtgtgtggagtggtgtaatgtagtatttattttgtgagtttggtaattgtttgttattaaaagaaaaaaaaattatggagggttttgggggtgtgtgttggggaggggagattgatgtttttaatttagtttttgttttgattgtgtgttgtgtagttgagtgtgaggttaatgttgagtaaggttttgtagggaggttgtttttgtgtaattatgaaagaaggttagtttgaaggtgtaaaatagtagggagaggatgtgtttttttaggaataagatttttggatgtttttagttttaaattgaaagaagaggggtgttttttttgtttgaaaataaataaataaataagtgtgagttatgagggtggtgttgtggtggtttttttggttgaaggtgatattttgtggagattgagtagaaagtggagttgtttggttttggtgtggatttggagtgtggttattttgtaggttttttgttgtttttgtgggattgtttatgtgtttttattattgtggaggaggaggtggtttggttttgttttttagggggaatgggtgtatgttttttgtagttgtttttagggtttttaagttaatttttttaaagttattattttttttagttatgggtaggtgaatttgatttattgagatggaagtgttgtttatattttttgagatttagttttggtttaaatagtttgattttaaattgttgaagggaaaaaggaaagttgttgttattattttgtttttttgtgttttagtttttttaattgtgaaatggagtttgtagtgttttttatttgagagttatgaaagtttttataagtttttagtttataatagttgtgttagttattattatgatgatgattatgatatgttatttttttggggaaaataatatttttttgtttagtagtagtattggttttttttttttttgttattattaaattttggttttattttattttggtttagttttttttataggtgtatttgtttgtagggggttagatattattgtttttgttttttaaattttttaaaaataattttgattttttggatagttttttttataattaaatatatagtgaggtgggattttgttttgaaaaatattttttaggtttgtttggagagaggggaatttggttttgggattggggtgggaaggtttttttgtttttttttatttttttttttaaattggaaatgttattttttattgtttttatttttttattttattattggatttagttaaggaggaggatgttgagggttagggggtaatttataaaatgtttatagattagtatttgtgaaggtttttttagttttgattttggatgtttatagagttttagggagaaagatttttagagttttaggaagaggtttatgaatgtggatgagtagtttttttaagtatttttattattgttattttttttataaatgtaaaagtttttatttttgtaaaagttttttat

SEQ ID NO: 361 - DNA, 2501 bp, Artificial Sequence
  chemically treated genomic DNA (Homo sapiens)
tggagtgtaatggtgtaattttggtttattgtgagttttgttttttgggtttatgttatttttttgttttagttttttgagtagttgggattataggtgtttattatgatatttggttaatttttttgtatttttagtagagatggggttttattgtgttagttaggatggttttgattttttgattttgtgatttgtttgttttagttttttaaagtgttgggattataggtgtgagttattgtgttttgtttaaggttggtttttgttatttgtaattaataatttagattagtatagtaattattttagatatttgtggattagagaaaagttattaaaggataatttaatgtttgtgttttggggttgtaattaaatttggaatttttttgatttgtgttttttgtttagtataaagtagggtatataagttgttttagtgaaatttggttagttgagttttttagtaagttagttagtttataaatgtttgttagaagttgttttaggtgtagaaattataaagtaagtaggagtaggtttttgtttttaagatgttttatatgtagtatagatttaatgtatttaaaatggaaggttgttattttttttgtttttttaatttatataataatatatatttgtgttttatgttttaattatattgaattgtttgttttttttatttttgtttgttaatagtgagtagtttggtgtttttagattataggggtgggagggaaagagagagatagtagataattaggttggggtagatagatattagattttgatgttaggtggaggaatttagatgtattggttgttgttttaagttatttttttttggtttaaattttagattggttgtatagtttaatttttttttttttattaaaggttatttgtgtagaagatgatataaagggggatttagtatggtgatttgtgtttgtaatttttgtatttttggaggttaaggagggaggattatttgagtttaggagtttgaggttgtagtgagttatgattgagttattgtattttagttttgatgttgagtgagattttgttttttaataaaatatatttaaaatttaaaaagaagattatataaaggggttatttattattttggttagtaatgtagggtaaaatttgaaataatttggttttgtagtattttttagatgttaaatttttattttttattgtatagtttttatagtgttttgtgtgagatgagagggagtatggtgggttttagttggttttgttttgggaaaaattttttatttttgtattgtttttttaaagtgggggttaagttagtgttgtttgtttttttatttagattagattttttttttagatgtttttatttttttgaagttttataataattttgtgaggtaagtattattatttttttattttatagatgaaattgaagtttaggaaggttatgttttgggttttaaattttggaatttttgttttgatgttatttaggtttgggttattgagtttaagaaatgggttgatgggtgattagatggatgttgggattagtttaagtttagggttgagggttgttaggtggtgtgtttttttttttttattttttgtggtggtttgggtgtatttgaatttagtggggtgtgttggggaaagtaggtgtgtagggtggggtggggagtagttttaattttttagtttggagtgggtaaggagtatggtttagtttagttggttggtattgttaagtggttgttgggttgtattagttttttttttgtttgtgttttttagtgtgtaatttatttggggggttattggggattgaatggagtgggtgagtgttgttaggaggtggggttggttttatttgttgattgtttgtagtaggtagggagagggtggggtttgttttatagggtttgttttttagtttttgggttttgggtgtgtgatgagatataaggtagttaggaaataatgtgtttgtagtttgtgtttttgtgttgattttgagagtgtttgggttgttgtgtgtgagtgagggagggtgtgtgtgtggggggggtgtgtttgtgagtgtgggttgtgtttttggtggtgtgtatgtgtgtgtgtgttggttgttgggttgttttgagttggtggggagttggtttgttttaggtggtgggtggttggagtgaggtgaggttgtgggtggttagggtatgggtgtgggttttgtggtgtgggttggttgtaggttgttttttgggtatggtgtgtttttgtttggttttgttgggttttgggagttgtgttttgggtggtgttggtaaagtttgttttgaatttgttgtttatagttgggtttgtgtgttgtgattggttttttttattattttgatttggggtttggttttttgggatgtgaggattgggtgtaggttgtaagttggtggggttggggaggaatgagagtttggtagttgattgtg

SEQ ID NO: 362 - DNA, 2501 bp, Artificial Sequence
  chemically treated genomic DNA (Homo sapiens)
tatagttggttgttgggtttttgtttttttttaattttattagtttgtagtttgtgtttagtttttgtgttttgggaagttgggttttgggttagagtggtaggggaagttaattgtagtgtgtggatttgattgtgggtagtgagtttaaagtaaattttgttagtgttgtttggagtgtagtttttagggtttggtggggttgggtgggggtgtgttgtgtttagaaggtagtttgtagttagtttgtattgtgggatttgtgtttgtgttttggttatttgtagttttattttgttttagttgtttgttatttggagtggattggttttttgttggtttggggtagtttggtagttagtatatatgtatatgtgtgttgttgagagtgtggtttgtatttataagtgtgttttttttgtgtgtgtgtttttttttgtttgtgtatggtggtttggatgtttttgggattggtgtgggagtgtgagttgtaggtgtattgttttttgattgttttatattttgttgtgtgtttgggatttagggattggggggtgggttttatgggataaattttgttttttttttgtttattatgggtagttgataggtggggttggttttattttttggtagtgtttgtttgttttgtttaatttttggtagttttttaaataaattgtatgttggggagtgtaaataggaggagggttgatgtggtttggtggttgtttggtggtgttagttggttgagttaaattgtgttttttgtttattttgagttggggaattagggttattttttgttttattttgtgtgtttattttttttggtgtattttgttgggtttaggtgtgtttgagttgttgtgaggggtagggggagggaaatgtgttatttggtggtttttagttttgaatttgggttggttttggtgtttgtttggttatttgttggtttgttttttgagtttagtggtttaagtttggatggtattgaagtgaagattttgggatttagagtttgaaatgtaatttttttgagttttagttttatttgtaaaatgaagggatggtaatgtttattttatagggttgttgtgaggttttagggaaataagagtatttagggaaggggtttggtttaggtggagaggtagatggtgttggtttagtttttgttttggggaggtggtgtagaaatgaggaattttttttagggtaaagttagttgagatttgttatgtttttttttattttatataaaatattgtaggagttgtatagtagagaatgaggatttggtatttggaaaatattgtaggattaagttgttttaagttttgttttgtattgttggttaagatgatagataatttttttgtataattttttttttaaattttaaatatattttgttaagagatagggttttatttagtgttaaggttggagtgtagtggtttgattatgatttgttgtagttttgaatttttgggtttaaatgattttttttttttagtttttgaaagtgtagggattataggtatgggttattgtgttgggtttttttttgtgttattttttatatagatgatttttggtggaagagaaaaaattaaattatatggttagtttgagatttaggttagaggagagtaatttgggatagtagttaatatatttagatttttttatttggtattaaggtttggtgtttgtttattttagtttgattgtttgttgttttttttttttttttttatttttgtggtttaagaatattaaattatttattgttggtagatggaagtgagaagggtaagtaatttagtgtggttggagtatgggatatggatgtgtgttgttatatgggttgggaaggtagggaaaatgatagttttttgttttagatatgttgggtttgtgttgtatgtgggatattttgaaggtagaaatttgtttttatttgttttgtgatttttgtatttagaatagtttttggtagatatttgtgaattaattgatttattgagggatttagttaattagattttattgagatagtttgtgtgttttgttttgtgttaaatggaagatataaattagaagggttttaggtttggttgtagttttaaggtataggtattggattgttttttagtgatttttttttggtttatagatgtttgagatggttgttgtattagtttgggttattggttataaataataaaaattaattttaggtagggtatagtggtttatgtttgtaattttagtattttgggaggttgaggtgggtagattataaggttaggagattgagattattttggttaatatggtgaaattttatttttattaaaaatataagaaaattagttgggtgttgtggtgggtatttgtagttttagttatttaggaggttgaggtaggagaatggtgtgaatttgggaggtggagtttatagtgagttgagattgtgttattgtatttta

SEQ ID NO: 363 - DNA, 2501 bp, Artificial Sequence
  chemically treated genomic DNA (Homo sapiens)
gttaaggtgggtggattgtttgaggttaggagtttgagattagtttggttaatatggtgaaattttgtttttattaaaaatataaaaattaggtatgtgtgatggtgtatgtttgtaattttagttatttgggaggttgaggtaggagaattgtttgaatttgggaggtgaaggttgtagtgagttgaaattttgttattgtattgtagtttgggtgataagagtaaaattttatttgaaaaaaaaaaaaaggaaagaaagaaggaaagagaaggaaagaaagaaggaaagagaaaggaaggaaagaaagaaagaggaaaaaaggaaaggaaaaggaaaaagaaaagaaagaaaaggaaggaaagggagaaatgggatgtttgttaggtgtagtgttttggggaggtgtggagagtttataatagggattaaggtgttttttagttgtagaatatggattatttgttaggtgtggttttggtatatttaggttattggttttgttgatttgttaaatttaattatttgggtatttttttggttaatatagaggatgtttttatgtgaatatgtgtttatttgtgaaatgtttataatgttaaaggtttgttttggggtaaatatttgatagtgtttggtaaatttaataaatgttttttttgtaatgagtaagttttttaatgtttaaagaaatagttgaatttgttagtaatatgttggatgttttttttatgtttgtatatttttttgttagtttttttttttttttttttttgagatggagttttgtttttgttgtttaggttagagtgtaatggtgttattttgttttattgtaatttttattttttgggtttaagtgagttttttgttttaatgttttgagtagttgggattataggtatgtgttattatgtttggttaattttgtatttttagtagagatggggtttttttatgttggttaggttggttttgaatttttgattttaggtgatttgtttgttttggttttttaaagtgttgggattattggtgtgagttattgtgtttggtttgttagttttaatatttatgttttttggagggtgaagggtttgaaaggtattaaaaattttggtttttaggagtgagttaaatttttttttttagagattgaaggaggttatttgattttgtttttaggaaaatttaatttgtaattttttttttgttttggtttttttaggttttattatttgtgttggggagatgtggtttggtttatgttaggttggtaagaatttattaggttttaggagggtggggttgagttttagaagttggggtttgggttaggagttttggtgtaggtggatttgggtgtgtgttatgggattataatttttggtatgtattgtggattgtgttgaatatggttggttgggagatttaattttattgtttttattggttaatgggatggaggaaagaggtttgatttggatttttggaggttaatggtaatatagaggaggtgggtgtttttttattatttattttgtgtttagagaagttatatttaaaaggttgtgttgggttgggtttttgtaggtagtgggattagagttgggaggggtggtggtgttttgggaaagtggtttttggggtatttgggtttttttgaggtgggttttggatgttgttgtgggtggggttgagggtggggtttggttttgttgtggagtggtttgtaatttattatggtggttgtggggtttggtgtttgtgtttgagtagtgttggagttggagttggtttttgggttttgtggttgaggagtttttttgttgtttatggtttttattggtggggggtggttgggttttttggtggagtttgggagatgtgattgtttgagggtggtggtggtgttagtgtttggggttgggggagggggtgttttgggtagagatttttgggtttggggtagttgaggtggttgggttttttttatatggggtttgttttttgttgtttgggttgtgagagttttttgttttttatagttttgttttggttttgggatattgtgggtggtttgttttttttagtttgggatattttgttttttgaggtgtggaagagtgttgttttggagtaagttgtttgtgttgtgttttgatagttttttttagttttaagttgttttttattttggattttggttttaattttggttatggagttttttatttaaattttttttttgttgttaaggggttttttttttttttaaggtggtttttgtgagtttttaatgttttgattttttttaatgttatttatggtttttttagttttagtttagttaaaaattttaatgtaaaggaaaagtttggattggttttataggttttttaaaaagtggatttaaaagttgttggtaatgtatttttttttgttagagttgagggtaaatttgttgaaatttgggtgatttgtgtttttttttggagagt

SEQ ID NO: 364 - DNA, 2501 bp, Artificial Sequence
  chemically treated genomic DNA (Homo sapiens)
gttttttggaaaaggatatgggttatttagattttagtgagtttgtttttgattttgatgaaaaggaatgtattgttagtaatttttaagtttgttttttaaaaggtttgtggaattaatttagattttttttttgtattaaagtttttggttgagttgagattaagggggttgtaggtgatattggaagaagttagggtattagaggtttgtgggagttattttgggggaaggggagattttttgatagtaagggagggatttgaatgggaggttttgtggttaaagttggggttgggatttggaataaggggtggtttggggttgagggaagttgttggggtgtggtatgggtagtttattttggggtgatgtttttttatgttttagaaaatggggtgttttaagttgggggaaatagattatttgtagtgttttaaagttggggtggggttgtaagggatgaaggatttttgtggtttagatagtggaaggtgggttttgtgtagaggaggtttggttgttttagttgttttaagtttgggggtttttgtttgagatatttttttttttggttttggatgttgatattattattgtttttaggtagttatattttttgagttttgttgagggatttagttgttttttgttggtaggggttgtggatagtggaggggttttttagttgtaggatttgggaattggttttggttttagtgttgtttaggtatagatattaaattttgtggttgttatgatggattatgagttgttttataatgaggttaggttttgtttttggttttgtttatggtgatgtttggagtttgttttgaggggatttggatgttttaagagttgtttttttgggatattgttgttttttttggttttggttttattgtttgtgaaagtttggtttggtatgattttttaaatgtggtttttttgagtgtaaggtgagtggtaaggaagtatttgttttttttgtattgttattggtttttgagaatttgggttaggttttttttttttgttttattggttggtgggagtagtagggttggattttttagttaattgtgtttggtgtagtttgtggtgtgtgttgggagttgtggttttatggtatgtgtttgagtttgtttgtattaagatttttggtttgggttttgatttttggggtttggttttgtttttttgggatttggtagatttttgttggtttagtgtaggttggattgtgtttttttggtgtgagtagtgagatttggaagagttaaagtgagggaaaaattgtggattggatttttttggaagtggagttggataattttttttagtttttaagggagaaaatttggtttgtttttagaaattaaggtttttgatgttttttaagttttttattttttaaaaagtataaatattagaattagtgggttgggtgtggtggtttatgttggtaattttagtattttgggaggttgagatgggtggattatttgaggttgggagtttgagattagtttgattaatatggagaaattttgtttttattaaaaatataaaattagttaagtgtggtggtatatgtttgtaattttagttatttaggatgttgaggtaggagatttgtttgaatttgggaggtagaggttgtggtgaggtgagatggtattattgtattttagtttgggtaataagagtgaaattttgttttaaaaagaaaaaaaaaaaaaaattagtgaagaaatatatagatatagggaaaatatttgatatgttgttaatgaatttaattgtttttttgggtattaggaggtttatttattatagaaaaggtatttgttgggtttgttaggtgttattagatgtttgttttagaatgaatttttaatattataaatattttataggtggatatgtgtttatatgaaaatattttttatattagttgagaaaatgtttagatggttgggtttagtaagttggtagaattaatgatttagatgtgttaaagttatatttaataaataatttatgttttgtgattaaaaagtattttggtttttattataggttttttatgtttttttagagtgttgtatttgataggtattttatttttttttttttttttttttttttttttttttttttttttttttttttttttttttttttttttttttttttttttttttttttttttttttttttttttttttttttttttttttttttttttttttttttttagatggagttttgtttttgttgtttaggttgtgatgtagtaataggattttagtttattgtaatttttattttttggatttaagtgatttttttgttttagttttttgagtagttgggattataggtatatattattatatgtgtttaatttttgtatttttagtagagatagggttttattatgttggttaggttggttttgaatttttgattttaagtgatttatttattttggt

SEQ ID NO: 365 - DNA, 2501 bp, Artificial Sequence
  chemically treated genomic DNA (Homo sapiens)
tttttgtgtgtggaatatattttttatatagttatattatttaaaatttattgtttttaagtttttatttaaatgtttttttgtgaagttatttttgagttttttttaaaattgtagttttttatttttgtattttttattgttttttatttttaatttttgttattgtagttagaattatttgatatatagtttttattttattggttttttgttatgtttttttttataagaatttgaagtttattaggttgggagttttgtttgttgtgtttgttgttattttttagtgtttaaaattgtttggtatatagtaggtatttaataatttttgaattagtgaaaattagatggtggtttggtatttttatataggaatgagttaggtggaaattatttaggatataagtagattttgaagtgataaggaagggttattataattatgtggggtttattttgtttttttttgttttttttttttaggtttagtaatagttttattaaggattttatgaatattaaagtttatatttatatgttgttagaggtgagagtagtttattttattattagattttgtgtttagggtggtgatttgaagaaggaagagagtgaaagaagggaaggattatttttttttttaaattggagttaagggagggaggttagagtaagtttgggggtgtaatttagatttagtttttgtttaattttttttgtttttttttttaggggtttagagaattataaggtttgtagaattttttagagaagttttattattgattttttttttttatttttagatattaaagagtttgaatgtttttgagttatatggtttttttttttttttataaattttgttagttgttatgggggtttgtttttagggtataaagttattgagagatttagagatttagtttttttgtggaatttttaaaatgttttagtagttttgtttttagtttgttgtttggtagtatttgttagttgattttatgtattgtttttttttttgttattttggtaatttgggttttttattttatttttttttttatttttttttttagatgttattttttgaattgttatagagaatgggttaatttatggtggaggtttgtttatttttataataattaaagggttttaaggtttatgtttttatatatttaattattttttaggtattttaaattatatttaaattttaatttagttttattttgttttagtttttgtttgtaagtgttttagtttttaatgggtatagatttggattttgttttttttagttgggtttttattttaggttgagtttagttattgttaattaatgtagagttaggttttttttttttttaattttggttgtagtttaattttgttttttgaaagtattttgtttttgttatttaatgtttttttgtgtgtttgatagttattttgtttttttatttttgttgtgttttaaatttgtttttatttagttttatggttttgtttaattgtagagttgttttgtttgtttatgtggagtttagtttgatttatttttgttggttgttatgtttatttttatataagttttgtttttgttgagtagtatggtgtgtgatattgtttttttggtgttttggtaggggtttagaagttttttgtttgttaattagagaaaaatagggttatttatttttgtttttgggggttgttttttattaattttatgtaagttaattagtgtgaggtagatttttgtttttttgatataggttttgagtttttttagttgtttatagtttgttagtttttgagttaattggtgtggagtattgtgaaggttgaatgtgtttttttgggattttaggggttgtgagtgttttattatttttttttatgttaattatggtatagttttgtagggaagggtttgttttttaattttttgaggttttgtggttgattaatagtgttttggttaattagtgagtggtgggatattgggttttttttttttgggtttatgtgagttgtagggaaatgtaggggtggtttttaggtgttgttgttgttattgttattattatttttattgttgttttggaatttaggtttggggggtggtggggttgtgtatggagtttttgttttttggagttgttaatattgttaatgttattgttatgttatatataggtgagttttgggtttggagggtggagggtttagtttgtgattttatgtattttttttgtttttgtgtagaggatgtggtttggttggtggtttgttggtgtttgattttttgttgttattattatggttggtggatttgtgtgtggtattgtttaagttttttgttttttatagtggatttgattgtggtttaattttttttttttgttgtataatggattggtttgtgtgtttatgtttttttttatgttaatttagggtggatttgtttataggttttttttttattttta

SEQ ID NO: 366 - DNA, 2501 bp, Artificial Sequence
  chemically treated genomic DNA (Homo sapiens)
taggggtagggggaaagtttatggatgagtttattttaagttggtgtggggaaaaatataagtatgtagattgatttattatataatgggagggggaggttaggttatggttagatttattataagggatgaagggtttgagtaatgttatatgtaggtttattagttgtggtggtggtggtggggagttgaatattagtaggttattggttaagttatattttttgtgtgggggtgggaaggatatgtggggttatggattgggttttttattttttaggtttagagtttatttgtgtgtagtgtggtggtggtgttggtaatgttggtagttttggggggtgggggttttatatgtggttttattgttttttaggtttgggttttgaggtggtggtggaggtggtggtggtggtggtggtggtagtatttagaagttgtttttgtgtttttttatagtttatgtgggtttgaggaggaggagtttaatgttttgttgtttgttgattggttaaagtgttattaattggttgtaaggttttgaggggttgggggatgggtttttttttatagagttgtgttgtgattggtgtaaggggaaatgatggaatgtttatggtttttggagttttgaggaggtgtgtttggtttttatggtgttttatgttgattggtttaaggattgatggattgtgagtaattgaaaaggtttggggtttgtgttgggggggtgggggtttgttttatattgattggtttatatgggattgatggaagatagtttttaaggatgggggtgggtggttttgtttttttttgattggtggatgagggatttttagatttttgttaaaatattaagggggtggtgttgtatgttatgttgtttagtggaagtagggtttgtatagaaatgggtgtagtagttggtgggagtgggttggattgggttttgtgtaggtgggtagggtagttttatggttagataagattatagagttgggtaaagatgaatttagaatatagtggaggtaggagggtaggatggttgttaggtatatgaaagagtattgagtggtagaaatgaaatgtttttagagggtagggttgaattgtggttagagttaaaaaggggaggaatttggttttgtattgattggtggtggttggatttaatttagaataggggtttgattagggagagtgggatttaggtttgtgtttattggaagttggaatatttataagtaggggttaagataaggtagggttgagttagggtttgggtgtaatttggggtatttggggaatgattgggtgtgtgaaagtgtaaattttagggttttttgattgttgtgggaatgaataaatttttattatgaattggtttattttttatggtaatttaaagggtggtgtttaggaaaaggaatggaagaaagggtgaggtggggggtttaggttgttaagatgatagaagagagggtagtgtataaggttaattggtaaatattgttaggtaataggttggaggtaggattgttggggtattttggaggttttatagagagattggatttttgggttttttagtaattttgtgttttaggaataggtttttgtggtaattagtagggtttatggggaaaaagaagggttatgtgatttaaaggtatttaggttttttaatgtttgaggatggggggaagaagttaatggtgaggtttttttgggaaattttgtaggttttgtagttttttaagtttttgaaaaagaggatagaagagattgaataaagattgggtttgggttatgtttttaggtttgttttgattttttttttttgattttagtttagagggaaagatggtttttttttttttttgtttttttttttttttaggttattattttaaatatagagtttggtagtggggtgagttgtttttatttttagtaatatgtggatatgggttttgatatttatggagtttttggtgaggttgttgttgagtttagagaaaagaaataagaaagggtaaaatgggttttatatgattatgatgatttttttttattattttaagatttatttatattttggatgatttttatttggtttatttttatgtggaaatgttaagttattatttggtttttattgatttaaagattattaaatgtttattgtatgttaggtaattttaggtattgggagatagtagtaaatataataaataaaatttttggtttgatggattttaaatttttgtaaagaaagatataataaaaaattaatggaataaaagttatgtgttagatggttttaattataataataaaaattaaaaatgagagataataaggagtataggagtggggggttgtaattttaaagagggtttagggatggttttatggagaagtatttgagtaaagatttaaagatagtgaattttgagtagtgtggttatatggaggatgtgttttatatataaggg

SEQ ID NO: 367 - DNA, 1176 bp, Artificial Sequence
  chemically treated genomic DNA (Homo sapiens)
gagtttgtatgtttttttgtttttaaggtattgtagtttttttgtttggaggttttggggtttgttttgttggattttgttttagaatttgtttagtgtgtaggatattgtgttttggtgtgtaaggttagagaggggtgtaattttggatgtggggttgttattgagtttgttttttttggtttttgaaaggttttgggtttagagttaagattgtgtttgtttgaggttgttgggtttgtttttttttgtgtttttagtgtagttgtttgttgtttgattggaagtttgtattttgttttgttttattttgtttgtgtgttggttgtggtattgtggtggttattaggatgttgaagtagtgtagttaatagtgttatgttggtggtgtgtttttggtagttagttaatgagatggtaaattaattatttgaaatatttaatggatggagtattgtggtgttaggagggggattgtgatagggagataggaggttgtggttgattaataaagattaaattggtttaaaaaggtggattttaggtagtttgattgatgggggtaaggttaattaaatgagggagtttgttagttttgttttggtagtttattttgagattagtggaggtgggtagggagggtatataagtgttggtggatggttggttgtagtattttgtgtgtttgtttttttgttgttgtttgtttattttttttttttttttgttgttgttgttgttgttattatgagggaaattgtgtatttgtaggttgggtagtgtggtaattaaattggtgttaaggtaagttgttggggtgttggggttaggtgggtttagttgggtggtgtgggtgggtggttggggaagatggtggtagtagtggttgggtggtgttttgtattgtggttgttgggttttttttgtggggaattggttgagttgggtgattgaagtttttaggtaatttgtggttagggtagtgtggggtggggggaggggtggggagggttggttgttgtgtttgtttggggtggggttgtttttttgtgtattggttgtggtgatttagttttgtttgtttgggtttgtttgtgttttttgtagttttgggaggtgattagtgatgagtatggtattgattttatgggtatttattatggggatagtgatttg

SEQ ID NO: 368 - DNA, 1176 bp, Artificial Sequence
  chemically treated genomic DNA (Homo sapiens)
taggttgttgtttttgtggtaggtgtttgtggggttgatgttgtgtttattgttgattattttttaaaattataagggatgtgggtgggtttgggtgggtggggttgagttattgtggttggtgtgtagggaggtagttttgttttggatgggtgtggtagttggttttttttgtttttttttttgttttgtgttgttttggttgtgggttgtttgggggttttggttgtttggtttggttaattttttgtggagggggtttggtggttgtaatgtggggtgttgtttggttgttgttgttgttattttttttggttgtttgtttatattgtttggttaggtttgtttggttttagtgttttggtaatttattttggtgttgatttggttgttgtattgtttggtttgtaagtgtatgattttttttatgatggtggtggtggtggtggtggggaagaggaggaagtagataaatagtagtagaagagtgggtgtgtagagtgttataattgattgtttgttaatgtttatatattttttttgtttgtttttgttagttttggaatgggttgttagaatgaggttggtaagtttttttgtttgattggttttgtttttgttaattaagttgtttaaggtttgtttttttaagttagtttggtttttattggttagttgtagttttttatttttttattataattttttttttggtgttgtagtgttttgtttattgggtgttttaaatgattgatttgttgttttattggttggttgttgggagtatgttgttagtgtggtgttattggttgtgttgttttagtgttttggtaattgttgtagtgttgtggttggtgtgtggatggggtggggtgaggtggagtgtgggtttttggttgggtggtgggtagttgtgttgggggtgtgagggagggtgggtttgatagttttgggtaagtgtagttttggttttgagtttggggttttttgggagttgggaagggtaggtttggtggtggttttatgtttagagttgtgtttttttttggttttgtgtgttgggatatggtattttgtgtgttgggtgggttttggagtggggtttgatggagtgagttttggggtttttaggtgaggaggttgtgatgttttaaaggtaggaagatatatgggttt

SEQ ID NO: 369 - DNA, 792 bp, Artificial Sequence
  chemically treated genomic DNA (Homo sapiens)
ttgtagaggaagaagggggttgttggtaaatttgttgatttaggttttatgagggagtaagtaatattggattttttttggtattttgagaatggggtgggggtgtttttaaaggatttttttttttttttagtgtttgtttttgtttttggtttgttttttgttaagatttggggatttttagggtttggagggaaagttttttgggatgattatagagtgttagtattgaattagtttggagagtgtggaaggaaagggttggtttgtagagggtgtggggaaggtagggtggggatgtggtggagtttgtgtttgtttgttgaaggtttggaagtgtagtgtagaagatagagggtgattaggaagatgtgtgaatggggttggttggttggtgggtgggggaggggaggtgggggaaggtggttgagtgggtttttggagtgtgtgtgtttgtgttagtgtgtgtgtgtgtgtgtgtatgtgtgtgtttggtgtttggttagggtgattttttataaattatatgttttttagtttttttttaaaaggttgtgttgagggttggttagtgaggtttggtttggggaaagtgaaagtttgtttgggtttttttggtgttagagttgttttttgtattttaggatagtggtgtggtttttggttggggtgtttattttgtagtagttagtgagtgagtgagtgagtgagggtggttgatgtgtttggttgggatttagttgtttgtatgattgtgttgggtgttgttgggtgttgtttttttatggtaag

SEQ ID NO: 370 - DNA, 792 bp, Artificial Sequence
  chemically treated genomic DNA (Homo sapiens)
tttattgtgggagggtagtgtttggtggtgtttggtgtggttatatgggtagttgggttttggttgggtgtgttggttgtttttgtttgtttgtttgtttgttggttgttgtggagtgggtgttttggttgagggttgtattgttgttttgggatgtggagagtggttttggtgttgagaggatttaggtaaatttttattttttttgggttgagttttattggttagtttttggtatagttttttaagagaggattggggggtatgtggtttatgggaaattattttggttaggtgttagatatatatatatatatatatatatatatattgatatagatatatatattttagaggtttatttagttgtttttttttgtttttttttttttatttgttggttggttagttttgtttgtgtgtttttttagttattttttgttttttgtgttgtatttttaagtttttagtaaatgagtgtgggttttattgtgtttttattttgttttttttgtgttttttgtggattgattttttttttttgtgttttttaggttgatttagtgttagtgttttatgattgttttaagggattttttttttaggttttgaaaatttttaaattttagtagaaaatggattgagagtagggataagtattgggaagggagggaaattttttgaagatgtttttattttatttttggagtgttgaaaggagtttagtgttatttgtttttttgtggagtttgagttagtaggtttgttggtagtttttttttttttttgtag

SEQ ID NO: 371 - DNA, 6325 bp, Artificial Sequence
  chemically treated genomic DNA (Homo sapiens)
aagtttttttgggtaaattatatataattagataggttgggttagggttgtttataagattttagtttagagtgtggtgtagtagtttattttttttaggatttttgttgtaataggatatgggagaagggaaatattaatgttagtagaatgggaggaattagattatggagatatgatttttgttttttggtattttttttagttgatttagaagaggatatagagggagatagatatatggttatttttataattataaattttgttatatgttgagaggatggttttttaaagttagttagtgtataagtagtggaggttgggattgttttattttttttgtttagggttatatagtttggtagatttggaaagatttttttgagaaagtgattttggaattgatattttagtggaaataattaggtattgggagggggtgaggtgaggagaaggttaagaatttttatgtagagggaattttgtgtagagattttagttaggaagaggttttgtatagtggaggaattgaaagttaatagttaggttatagtatagagtaaatgatgttggggtgtgaggtgatgttaaaaggtagatattagggttagagggtgtataattttgtaggttgtgttaatgattttgttttttatttaagaatgttattttaggagattagttaaaaggttagggtgatggtgatggtggaaatatagaaaaaggaatttatttaagaggtatttaaaaagaagtgaaatagagatgagttggagatagattggataaaaagagtgagggagagggaggtgttaggttgtagtttaggttttgagttgttaaagaggagtttttttttttaggtgagttaaggtttagaattatgatttttggttatttttttttatttttagtgtgagaagtggtgagttggttgtttaggtatatattgttattttatatttattgtttaagatagaggtgtatatttggaaagtgaatgagttaggagttagaggagaaggtatgttggtagagtttagggtgagaggaggaagagagtttgggggtgtgtttttaaaaaggagatagggaagatagagtagaggttggggaggggagagtaaggattatgataggaggaaagagaggttagggaatattgaggtggaggaattttgggatatgatagttgtaaagaattgtagttaatttaatttagtttttttaatgtgtaattgaggaaattaatttttatgtgtttattttattgtaaatgtggtatttgtatttgagaaattttggaaaatataaagatgtaaagtaaattaagattatttatagtttttttatttagagatatgtattgttaaagtaaggattttgatttttttttttttttgtatttttattatggttggaattgtaatatagatataattttatgttttgtttttaaaatataaataatggttgtaaagtgttttatatgttgatttaaagttttttttgaaataggaaattgagatatgttggttgtgaaatttattgaagtgagtggtggtgttaggaatttttgggattttgatttttttgtagtttgtatagttaagggtgagggtgttttttggtagaagtagtaaattgttggtaagtttagtgaggagggttgttggggtttgggtttgggaattggttggtatttagtggaaagggatgtgagttgagtggtgggggagaagagtgtgtaggttagagggtggttgtagtgggtttttgtgaggtttttatgttgggtgatatggggtgtttgttgtttttgttgttttgggtgtttttttaggtttggggaagtgttgaaggtgggtggaatgagggtgtttgagtgtatttgtgggagggtggagagagggagttgggtagggatggggagggtaatgtttgatggggattggtgagatttgggatgtattggtgtgatttaggtagaaaatttgttgttttttggttttggggagaggtagtgtggtatagagtttgttggtattagttgttttttgaagtttatttttttttgttttttttttttttttttttatgttggttgtttttttggttatttgttatatgtttttaatttttatttttttttagttttgtaaaggtttttttttttttgttgtttttagattttgttttttgttaatagtagttggatgtgtattgatggtttggtgtggttgggggagttgtagatgtatagttggagtaatgatttggatattgtttgttttttgaagttttggttttagggtatgtttagtgattagtagtgggagatgttgtagtatatattttgggtttattgaagtagttttattagggatgtgaaggaatttgttaaaatgttatgtttattttgtgagttgagggataggattttgggttggtatttaaggggagagaatggttatagaaatttaattgggagattgtggtattatttgatgagattttttgttttgtttatttttttttgattttttttttatttggagatgttttaggttttgattttttaaatgttttttgtttttgtttattttaggttatttatttttttttttttgaagtttgggtttttattataatttgtatattaatttttttttttttattttttttagttttttaaatttttttttgatttttttttatttttttttatagattttttggagttttaggtgtttgttggttgtgaggtgtattttgggaatgttttaaataattttttttatgtagtattttaaggaaaagatattttgagtttttaaggaattttttgggagttaatttaagaggttttattttgggtaaatttggttatttaagtgtttaattaggataagtggatgagggaaatagtgtagtggttttttaatggtatttgtttttaatttgttagtggtttttttgagttagggaagttggaattgaagaagtaaggttagtttgttttttttattttttgtattttattttagggttttaaatgggtttttttattttagggtttttatttttttgagtatttaaagaagaggaaggtttaggaggggttggataaggggtgagggtatttatttattttatagatattaattgagtattttttgggttttatgaatttaattaatgaataattgggggtgaaaggtgttaggtagttagttaggatttttgtttggtagggggatgttaattaatgtaatgtttgaaataggttatatatgttattttaaaataaagggtgttataggggaatagataaggggtatttataggaggttgggattagagaagaagaaggagtattagggtaggttttttgaagaaggtgggataaatggattgaaagttgtgggagattttatttttagaagtgaatatgttaggggtatataggaaggagggaaataaagatttgaaagttaaaaaggatgatatgaggtttggagtttttaatgtagagtttttattttaagattttttttatttttttgttggatatagtgaagtttaaggtttggttgttttgtggttttagttttggttttggttgtttgttgttggtgtgttatgttttaggattttatttaaagtttgtatgggtgaagtggatgtggggtgagtaggagtagtagggtatttagttaggggatattttgtttaatgttgatgagatatggtatttttgagtaattttggatgtggtggttggggaggtagttggtttgttttgttgggtgaagtatagtagtttagagggttaggatattgttttttattggggtgagaaaaagttgggtttaagttggaaatggtaggaggtggtttttaggtatagagggaggtattggggtgggatgtggtttgatatatttaggttagaggagttttagagatgaggtttttagtaaaaggatagagagaggggttttagatataggaaggagggaaataaagatttgaaagtttaaaaggattgaaatagtgttttttatatataagaagaaataagattataaaatttagggatttagaagtaggtagtgaataaataattttaggatgatttattttttggtttaaagggagttaggtttttgggaaggtaggttagtaaagatagtttggttggttgagtgttttttgtgtaggggttaatgaatttgtatataatattttattttattatttatagttttttttgaagtaagtattgttttttttgttatatagatgaggaaatgaaggtggagataggttaattgtttggagttatatagaaagtggatgggttggatttagatttaggtttgttttgttataaagttgttgttttttttttttatgttatattagtaaatgttaaagtgggttgaatttgggatgtttaggtattgaaaataagatggggaatttaaatttatgaggaatagaaattggggttttaagtggaggaggaaataagaagtatttggtatttttatatatgtttagattaggggattggatatatgtagagaggggttttgtgttgagagatagtttatgtttttttagagtaggtgggagttatatttttatgggtttgattgttttggtagttttggtgtgtttgttgtttttttttattgtgggttttattttttggtttaagaggtaaatgtaagtttttttttttttttttttttaatttttttttttttttatttttggttttttttttttttaatggtttttttttttttatttttttatagtttttattagggtgttttgtgatttgttttgttatatttgtgtttttggaatttaggatttttggattttaggtttttaagattttagttttggtttgtttaggaattgaagatgtaaggaattgaagataggagagatattttgaaaaagtagagaatagttatgaggtagtttttattatatttttttaatatttatttaaaagaatttaaatttttttttaaaaattatattataagtttataagtttaaatggttttgtgaaattagaagtgtaaaggtgtgtaaatttgtatttgaagatttattagggataagtaggtaagagttgatgtgagtgtgtgtgatgggatttgtaaggaattggaatatatatgttttatttaaaggaattagttgtagttgtttgttgttaagtataaagttaggatttggtttggttttaattgttttttaagaaaattggaaatttggatttttagtgaatatgtttgattttaaaaggttgatttaagtttttataaaatattatgtgggatattttaaatatatatttattgattgatgataaatttaggagtttgtgtgttttttataaaaagtttgttttggatgttatattggtagttggaggatatagtttttattgtaaatttggatttatgattgaagaaggatattttttttttaaaagaaagttaggttataagaaatagaggtgttttatatttttatttggtgtaattaataaatgaagataaattatagtgtatgtgtattatgttgaaaaaaattattttgagtaaggatattttttttaaatggttattattttttttttttggaggaagattgttatgaaggtatttttttttttttaaaatgataatggtaataataatagttttttttatttatagttattaaaagagataatgtagggaaagggttaatattatttgggtaagtatgagttgtagtgatgatggtgatggtagtttagttatgttgtgtttttattttagagaggatagagtaggaaatttataggggtagtagatttttttgatgttaaagaaataaggaggttaaaattatgtttgtttagttgggaggtaaattttttggtagttagggtttttgaatatttagaaaaaataagtgagatttaattgttggagagtgtttgtttgagaaaagtaatattttatattttttatattagatttgtatatatgaatttaggatgtgtgtgaagattttgttagttttaatatattttaaagtatttggatatgtttataatttaagtgttttgggaggttgagataggaggattgtttaaggttaggtatttgaaattagtttgggtaatatagtgagattttgtttttataaaaaattaaaaaattagttatttatggtggtgagtgtttgtagttttagttattttggaggttgaggtgggaggattttttgagtttatgaattt

SEQ ID NO: 372 - DNA, 6325 bp, Artificial Sequence
  chemically treated genomic DNA (Homo sapiens)
gaatttatgggtttaagggatttttttattttagtttttagagtagttaggattataggtgtttattattatgggtggttagttttttaattttttgtagagatagggttttattatgttgtttaggttgattttaaatgtttggttttaaataatttttttattttagttttttaaagtatttggattataggtatatttaagtgttttgggatatgttgaagttagtagaatttttatgtatattttaaatttatatgtgtaagtttagtatagagagtgtgaaatgttattttttttaagtaaatattttttaatagttaagttttatttattttttttgggtgtttagggattttgattgttaagagatttattttttagttaggtaaatatgattttggtttttttatttttttggtattagaaaggtttgttatttttgtaagttttttgttttgttttttttaagataagaatatagtatggttgggttattattattattattgttgtagtttatgtttgtttaagtggtgttggttttttttttatattgttttttttaatagttgtaagtaaaggagattgttgttgttgttgttgttgttttgggaaggaagggatgtttttatgataatttttttttaaggaaaaaaagtgatgattatttgagagaaatatttttatttagagtagttttttttaatataatatatatatattatgatttatttttgtttattaattatattaagtaaaaatgtgagatgtttttgttttttataatttaatttttttttaaagagaaaatgtttttttttagttgtaaatttaaatttataatagaaattgtgttttttaattgttaatatgatatttagggtaaattttttataaaagatatataaatttttgggtttgttattagttagtaggtatgtatttgaggtgttttatatagtattttgtaaaaatttgagttaattttttaaaattaggtatgtttgttgaaaatttagatttttagtttttttgaaaaatggttaaagttaagttaggttttgattttatatttgataataagtagttgtagttgatttttttggataggatatgtgtgttttagttttttatagattttattatatatatttatattagtttttatttgtttgtttttggtaggtttttagatataagtttgtatatttttgtatttttgattttatagagttatttgggtttataaatttgtagtgtaatttttgaaaaagaatttaaatttttttagataaatgttaaaagggtgtgatgaaagttgttttatgattgttttttatttttttaaggtattttttttatttttaattttttatatttttaatttttgagtagattaggattgaagttttgggaatttgaggtttagaggttttgggttttagagatatagatgtggtaaggtgagttataggatgttttgataggaattgtgagagaatagaaagggaaagattattaaggaaaagggaagttaggaatgaaggggagagagagttgaggaaagggaaaggggagaatttatgtttgttttttaaattgggaggtaaagtttataatgaggaggaatagtaagtatgttaggattgttaaggtaattaagtttatggaggtgtagtttttatttgttttggaggaatataggttgttttttagtataggatttttttttatatatatttaattttttggtttaggtatgtgtgagggtattaggtgttttttatttttttttttatttaaaattttaatttttattttttataagtttagattttttattttgtttttagtgtttgggtattttaaatttagtttattttggtatttgttagtgtagtatagagggaaagggtaatagttttgtagtaaggtagatttgaatttaaatttagtttgtttattttttatgtggttttgggtagttaatttatttttgtttttatttttttatttatataatgaaaagagtagtatttgttttaaagaaaattgtgaatgatgagatgagatattatatgtagatttattggtttttatatagggagtatttaattaattaagttatttttgttaatttgtttttttaaaggtttggttttttttaagttaaggaatgaattgttttgggattgtttatttgttgtttatttttggatttttgagttttgtagttttgtttttttttgtatatagagagtattattttaatttttttagatttttaggtttttattttttttttttttgtgtttggaatttttttttttatttttttattgggggttttatttttgaaatttttttaatttgggtatattaagttatattttattttagtgtttttttttatgtttgaggattattttttgttatttttagtttgggtttagtttttttttattttagtagaggatgatgttttggttttttagattgttgtgttttatttgataggataggttagttgtttttttagttattatatttagggttgtttggagatattatgttttgttagtattgggtaggatgttttttggttgagtgttttgttgtttttgtttattttgtatttattttatttatataggttttgggtagaattttgagatatggtatattagtagtagatggttagggttaggattggggttatgggatagttaggttttgggttttattgtatttaataagggaatgggggggattttaaagtgaaaattttgtattagaggttttaggttttatattattttttttgatttttaggtttttattttttttttttttgtatgtttttgatatgtttatttttggaaatgaagttttttataatttttaatttatttgttttattttttttagggagtttgttttgatattttttttttttttttggttttagttttttatgaatgttttttgtttgtttttttataatattttttgttttgaagtaatatatgtagtttattttaagtattgtattaattaatatttttttattaagtagggattttaattaattgtttgatattttttatttttagttgtttattaattgaatttatagaatttaagaggtgtttagttgatgtttgtgaaatgaataaatatttttattttttatttagttttttttgggttttttttttttttgaatgtttaaagggatgagaattttggaatggaaaagtttgtttggagttttgaagtggaatgtagggagtaaggaaggtaggttgattttgtttttttagttttgatttttttgatttaaggaggttattgataaattgggggtaggtgttattaaggagttattgtattgttttttttgtttatttgttttggttgagtatttgaatggttaagtttatttaaagtggggttttttgggttggtttttaagaagttttttggaaatttaggatattttttttttgaaatgttatatggaagaagttatttgaggtgtttttagggtgtattttatagttagtggatatttggagttttaagggatttgtggagaggaatggagaaagattaaagaagggtttaaaagattgggagagatgaaagagaagaaattgatgtgtaggttataatggggatttagattttagggaaaggaaagtaagtgatttggagtaggtaggaatgagggatatttgaggagttaaagtttgggatatttttaggtagaagggaaattagaagagggtggatagagtagagaattttattaggtggtgttatagttttttagttgagtttttgtggttattttttttttttgggtattggtttaggattttattttttagtttataggataagtgtagtattttggtgaatttttttatgtttttggtgaagttgttttgataaatttgaaatatatgttgtagtgttttttattgttggttgttgaatgtgttttgggattaaggttttagagagtggatggtgtttgagttgttgttttagttgtgtgtttgtagtttttttagttatgttaagttgttggtgtgtgtttagttgttattggtgaaggatgagatttggaggtagtggagggggaaaagtttttgtgggattgggagagaatgaagattggaggtgtgtagtaagtggttgggagagtagttagtataaagagaaggaagaaagaaataagaggagatgagttttaggaggtggttgatgttagtgaattttgtgttgtgttgtttttttttggagttagggagtagtgagttttttatttagattgtgttagtgtgttttgggttttattagtttttattaggtgttgttttttttgtttttatttagttttttttttttgtttttttgtgagtgtatttaagtgtttttgttttatttatttttagtgtttttttaagtttggaggagtgtttagagtagtagaaatagtaggtattttatattgtttggtgtggggattttgtggaggtttgttgtggttgttttttgatttgtgtattttttttttttgttgtttagtttatgtttttttttgttgggtgttagttaatttttaagtttagattttggtagttttttttgttgggtttgttggtggtttgttgtttttgttgaagggtgtttttgtttttagttgtgtgagttgtaaagaggttggggttttaggaatttttggtgttgttgtttattttagtaggttttataattggtgtgttttaattttttgttttaaaggagattttgggttaatgtgtgggatgttttataattattatttatgttttggaagtaggatataaggttgtgtttgtgttataattttaattatggtaaaaatgtaaagggaaaaaaggattaaagtttttgttttagtagtatatgtttttaggtggaaagattatgagtgattttaatttgttttatatttttatgttttttaaaattttttaagtgtaagtattatatttataataaagtaaatgtatgaaaattaatttttttagttgtatattgagagaattggattaggttggttataattttttataattgttatattttaggatttttttattttagtgttttttagtttttttttttttttgttatggtttttgtttttttttttttggtttttgttttgttttttttgttttttttttggggatgtgtttttagattttttttttttttttgttttaggttttgttgatatatttttttttttggtttttgatttatttattttttaaatatgtgtttttgttttaaatagtaagtgtaagatgatagtgtgtatttggatagttaatttgttattttttatattgaaaataagaaaaagtgattaaaaattgtggttttaagttttagtttatttggaggaaaagatttttttttggtaatttagaatttgggttgtagtttgatattttttttttttttattttttttatttaatttatttttaatttatttttattttatttttttttgaatattttttgaataaatttttttttttatatttttattgttattattattttaattttttgattgattttttgaagtagtatttttgggtagaaaataaaattattagtatggtttgtaagattatgtgttttttagttttggtgtttattttttgatattattttatattttagtattatttgttttgtattgtagtttggttgttagtttttagtttttttattatgtaaaatttttttttgattaaggtttttgtataaagttttttttatatgaaagtttttgattttttttttattttatttttttttaatgtttagttatttttattaaggtattagttttaaggttatttttttagggaagtttttttagatttgttagattgtgtgattttaggtaggagaagtagggtagttttaatttttattgtttgtatattaattggttttgagaagttatttttttagtatgtagtagagtttataattatagaaatggttatatgtttgtttttttttgtgtttttttttaaattagttgggagaggtgttagaaggtaaggattatgtttttataatttgattttttttattttgttaatgttaatgtttttttttttttatattttgttgtagtaagagttttagagaaaataggttattgtattatattttaggttgggattttgtagatagttttaatttagtttatttaattatgtgtaatttgtttaaaaaagttt

SEQ ID NO: 373 - DNA, 5942 bp, Artificial Sequence; identical to SEQ ID NO: 287
  chemically treated genomic DNA (Homo sapiens)

SEQ ID NO: 374 - DNA, 5942 bp, Artificial Sequence; identical to SEQ ID NO: 288
  chemically treated genomic DNA (Homo sapiens)

SEQ ID NO: 375 - DNA, 4370 bp, Artificial Sequence
  chemically treated genomic DNA (Homo sapiens)
ggatttttggaaaatggagaagttgtgttaatagaggggggttagaaatttttattttagaatgttgtagaatgttgggagatatttaggatgtgagttagggattttttggaagtgtttgttttggttttatttgattttaggtagtttttagttgtttgtatagttggatggggagggggtttgtatagagttggagttagaggagagagttggtttattttttatggtaggatggggaaattttatagattatattgttatttggttttagttttttgttttggtgtttagagggtaatttttatttattttgtttgtttttttgaattagagtgatttaggttgttgtttgttttgtttttttattttgagttggtatggaggtatagtgttagaggggggttttaggtgttttgaggttttgtttttgtggttttttttttgtgggggtgggtgtttttttttgggtaggggttatgtggttttggttgggtggggggtttggtttattttgtgttgggtttagtgatttaggttgtagttgttattgtgttatatgagggaggttggtggttatttggtgggggaggggattgtggttggagtttggggtggggttgtgtggtaggtggggtgggagttggggggtgtagttagagagttttggagttgtggtgggagaggaatgtgtagttagttttgggaagtttaggtgaggttgtggggatttggtggattttggtgtgggttgggagagattatttgtagtttttttttttagggtttgttttaggtttgtggagatttgtttggtgttttttagttgttttggagtaattttgttttgaagttttttgggtttgggtagggtgtggtgggggtgttggttgtattttttttttttttggtgggtggggaggttagagtttaggggaaaggggttggggtgggggttggggttgggttgaagattgtttttttaggttgggtgttgggtggggaaagggtgtttgatgtttggagattggtgggttgagggttggtgttaggtttaagtttttgttggtgtttttggatttgttttgggttttagaggtggtggggtggggtttgggttttgtggttgttgtttttattttttttttgtgggtaaagagggggttgggagatgtggatttgattgtgggtttttgggtgggaggggttgggaattggggttgtgaagggaagtttttgagggttggttgggagtttggaaattgaggtttttttttggttagttttaatttttttgtttttttttttgttttaggtttggtagttatggtggtggaaggaggaatgaaatgtgtgaagtttttgttttatgtttttttgttggttttttgtgtgagtggtgaggggttttggggggtgtgttggtagggtgtggggagatttggttttatagtggtgagggttgagggaatgagaattaaggtagttggagattagatgtggaaagaaagttagggaaagatagtgtagttatttttttttttagtttttttggatatttgaggtttgtttttattgagaatggttattttgggtgtgtagtaatttttatttttattttttttggttttttttgtttggtgatttaattatttgtgatatggggtagtggggtaattagttaattgtttgatgttattgttatggggtttttttttgttttttttttttttttttttttttttttaatttttttatttttgtttagtttttttttttttttttttttttttagtgtttgggggtgaggaagggttttgtttattttaatttgtttttgttttgggtttttggtttgagaggttattgtttgtatagggagggatatattatttttgtttttttttttttttttttttttttggtttaattggttagaggaattttagttatagttgatgtgtgtgtggatgtgtattggaggatagtgagggggtagttttgggtgtgaattgagttgggagttttggaggtttgtagaaagtattattttaggttagaaatatgtgttttgaggttaaggttttttgggaggtttttgaatttggttatgtttttgattaaagagttgggaggggattaggggaggtaggggtaggtaaggatgggttatttttttattttatagttaaagaaattttttagaggtgtgagaattttttttggggatggggttaagtttgtgttttaggtgtattttttgttttttattatggagggttattgtgttgtggatatggtttaatttttatttgatttttttttaggtttgtgtagtgggattgattgttgtgggtgttggggtatagtttgttttgagttagattataatttagggggttatttttggttttttgttgttagtggttattattgtagtgggtgtttttttttttttggtggtttttgtgggttgttgtggggtttgtaaggagaattattgttttatgattatggtgtgttggggtggattaatatgggtggtttgggattgttagagtagtttggtttgggtttaggaaggtgggtgaggtgggtgggtgaggaagatttttgtgagtgtttagggattggttgtgttaaaatgggtttttgtaatgtatagattttaaatttgatttttgttttttgtttttgtagtttgttatttttttgttttttattatgttggtggaggtggttgtagttattgttggttatgtgtttagagataaggtaagtagggaataatgggaagggtttgttttagttgggtttgggattttggtgtttgaattttgattgtaatagtgtttttttgtatttttaggtgatgttagagtttaataataatttttggtagtagatggagaattatttgaaaaataattatattgttttgattttggataggatgtaggtagatgtgagtggggttgttgggagtaggggtggtgggaatagagaatttttatttttaaggttgggtgtggtgatttatgtttgtaattttagtatttttgaaggttgaggtgggtagattatttgaggttagaagtttaagattagtttggttaatgtggtgaaattttgtttttattaaaaatataaaaattagttaggtgtggtggtgagtgtttgtaattttatttatttaggagggtgaggtaggagaattgtttgaatttgggaggtggaggttgtagtgagttgagattgagttattgttgggtatttgtttgggtaatagagtaagtttttgttttaaaaaaaaaaaaaaaaaaaaaaaagaatttttatttttatattgaaggtgaaggtttatttaataatttttttttttatatttttttttttttttagtttaagtgttgtggggttgttaattatatagattgggagaaaattttttttatgttgaagaattgagtttttgatttttgttgtattaatgttattgtgggttgtgggattaattttaatgagaaggtgatttataaggaggtagggaggagattgtgtatgggatttgggaaatttgggaaatgttttagaatgtaagagatttaggatggaggtggatagggttagggatggggaggggatttggaaatgttaagggtggggtgaaaggtataggggtagggaagagattgatggattaagggagggggttggggtgggaagtttttgatggtgtttttgttttttgtgtttgttatttttagggttgtgtggagaagattgggggttggttgaggaaaaatgtgttggtggtagttgtagtagtttttggaattgtttttgttgaggtaagagataattttgagtaggggttgggattttgtttagggtgtttggagggaaggggttgaggggaggagggtgttgaataggaggtattggtttgggagtgtgtgtttggagttttttgtatgggtttgaggtagttagtttttttgatttttttttatttttgtttttattgggttttttaggttttgggaattgtttttgtttgttgttttgtgaagagtattagaagtggttatgaggtgatgtaggggtttggtttttttagtttttttatttgggggagtggaatagtattttttaggttttttaattaaatggattatttttttagattgaaaagagatggtttgagtttgttttagagtgatgtttgatttttttttttttttattgatgttttttgttttttgggattttaatgtatgtgtattttgaggtttattttggggggtgtttgggaaaggaggattttgtgaaggtgttggttgggtaggtagtgggagaagtgaggattt

SEQ ID NO: 376 - DNA, 4370 bp, Artificial Sequence
  chemically treated genomic DNA (Homo sapiens)
ggatttttattttttttattgtttgtttaattaatatttttgtaaagttttttttttttaaatattttttaaaatagattttgaagtatatatgtattaaggttttagaggatagggaatattagtaaggaaaggaaggaattaagtattattttaagataaatttagattatttttttttggtttgaaaaaataatttgtttaattgaaaaatttggaggatattattttatttttttagatgaggaggttgaggagattagatttttatattattttgtagttatttttgatattttttatgaggtagtaggtaaagataatttttaaaatttagaaggtttgatggggataggggtggagaggagttagaagggttagttattttagatttatgtaagagattttaaatatatatttttaggttagtattttttgtttagtatttttttttttttagttttttttttttaggtattttggatagagttttagtttttgtttagggttattttttattttgataaaagtaattttaagggttgttgtagttattattagtatatttttttttagttagtttttaattttttttatatagttttgaaggtggtaggtataaaggataaaagtattattagaaattttttattttaatttttttttttggtttattagttttttttttgtttttgtattttttattttatttttagtatttttagattttttttttatttttgattttgtttatttttattttgggttttttgtattttaaaatattttttaggttttttaagttttatatatagttttttttttatttttttatggattgtttttttgttgaaattaattttatagtttatagtaatattaatgtagtaggagttggggatttggttttttgatatggaagggatttttttttaatttgtgtagttagtagttttatagtatttaaattgggggagggaagaaatatggagaagaaggttgttaagtgaatttttatttttaatatggagatgagaatttttttttttttttttttttttttttgagatagagatttgttttgttgtttagataagtgtttagtggtggtttaattttggtttattgtaatttttgttttttgggtttaagtgatttttttgttttatttttttgagtaggtgggattataggtatttattattatatttggttaatttttgtatttttagtagagatagggttttattatgttggttaggttagttttgaatttttgattttaggtgatttgtttattttggtttttaaaagtgttgagattataggtgtgagttattatatttagttttggagatgagaattttttatttttattatttttgtttttagtaattttatttatatttgtttgtattttgtttaggattgaagtagtgtggttgttttttgggtaattttttatttgttgttggaagttgttattaaattttgatattatttgagagtatggaggagtattgttgtagttagaatttaagtattagggttttagatttggttgaggtaggttttttttattattttttgtttattttatttttaaatatatagttagtaatggttgtggttatttttattaatatgataagagatagaaagatggtaaattgtaggagtaaaggatagaagttaagtttggagtttatgtattataggggtttgttttggtatagttggtttttggatatttataaaggttttttttatttatttattttatttatttttttgagtttgaattaagttgttttggtagttttagattgtttatgttggtttgttttaatgtattgtgattataagataatagttttttttgtaggttttgtagtagtttataaaagttattaggaagaggaagatatttattgtgatgatgattattggtaatagagagttaggggtagttttttggattatggtttgatttaggataagttgtgttttgatatttatggtaattagttttattgtataggtttaagagaaaattaggtgaggattaggttatatttataatatagtggttttttatggtggagggtagggggtatatttaggatatagatttgattttatttttaagagagatttttatatttttagggaatttttttggttgtggggtagggggatgatttatttttgtttgtttttattttttttgatttttttttggttttttaattagggatatgattaaatttaaaaattttttagaaagttttgattttaagatatgtatttttgatttagaataatgttttttataggtttttagggtttttagtttaatttgtgtttagaattgtttttttattattttttagtgtatatttatgtgtgtattagttgtgattaaggtttttttggttagttaggttaggagaagggaagaggaaaagggagtaagagtgatgtgtttttttttatataaatagtagttttttaagttaggagtttagggtaggagtaaattgaagtgggtagagtttttttttatttttaagtgttgggaggagggaaagggggagaggggttggatagggatgagagggttggggagggagagaggggagaagggagagtgaagggaagttttatggtgatagtattaggtggttggttggttgttttattgttttatattataagtggttgggttattagataggaagggttaggagggatgggggtaggggttgttgtatatttaggatggttatttttggtggaaataagttttaggtgtttaggaaaattggaggagggagtggttgtgttgtttttttttggttttttttttatatttggtttttagttgttttaatttttatttttttagtttttattattgtggagttaggtttttttgtattttgttggtgtgttttttaggattttttgttatttatgtaaaaggttagtaggaggatgtagagtaagaattttatatattttatttttttttttattgttatggttgttgggtttggggtagaggggagggtggggggattaaaattggttgaagggggattttggtttttgggtttttggttggtttttgagggtttttttttatggttttgatttttggttttttttatttggaaatttgtggttggatttatgttttttagttttttttttatttgtaggagaggggtgggggtgatggttgtgaagtttggattttgttttgttgtttttggggtttaggatagatttaagggtgttggtaggggtttgagtttgatgttgatttttggtttgttagtttttgggtgttaaatattttttttttatttaatatttagtttggagaaatggtttttagtttaattttgatttttgttttagttttttttttttgggttttgatttttttgtttattaaaaaaaaaaaaagtgtagttagtatttttgttatattttgtttgggtttagggaattttgaagtaaagttgttttagggtggttggagagtgttggatgagtttttgtgggtttggggtgagttttggaggaagggattgtgggtggttttttttagtttgtgttgaagtttgttgggtttttgtggttttatttgggttttttaaggttggttgtgtgttttttttttgttgtggttttggggttttttagttgtgttttttggtttttgttttgtttgttgtgtggttttgttttgggttttagttatggtttttttttttgttgagtggttgttggttttttttatgtgatgtggtaatagttgtggtttgagttattgggtttggtgtggggtgggttgagttttttgtttggttagggttatgtggtttttatttggaagaaggtgtttatttttgtaaagggaaagttgtaagggtaagattttggggtgtttggggtttttttttggtgttatatttttgtgttaatttggggtaggagagtggggtggatggtagtttgggttattttggtttagagaagtggatgaggtgggtgagagttattttttgagtgttggggtggagagttgaggttgggtgataatgtggtttgtgaggtttttttattttattgtaggggatgagttagtttttttttttggttttaattttgtgtaagttttttttttatttgattgtgtagatagttggggattgtttggggttgggtggggttagaataaatatttttagaaagtttttggtttatattttgggtgttttttaatattttatagtattttagagtggggatttttggtttttttttattagtatagtttttttattttttagggattt

SEQ ID NO: 377 - DNA, 8759 bp, Artificial Sequence; identical to SEQ ID NO: 249
  chemically treated genomic DNA (Homo sapiens)

SEQ ID NO: 378 - DNA, 8759 bp, Artificial Sequence; identical to SEQ ID NO: 250
  chemically treated genomic DNA (Homo sapiens)

SEQ ID NO: 379 - DNA, 4233 bp, Artificial Sequence; identical to SEQ ID NO: 275
  chemically treated genomic DNA (Homo sapiens)
  unsure (2320, 2321, 2336, 2351, 2363, 2413, 2723..2726, 3730): unknown base

SEQ ID NO: 380 - DNA, 4233 bp, Artificial Sequence; identical to SEQ ID NO: 276
  chemically treated genomic DNA (Homo sapiens)
  unsure (504, 1508..1511, 1821, 1871, 1883, 1898, 1913, 1914): unknown base

SEQ ID NO: 381 - DNA, 1303 bp, Artificial Sequence; identical to SEQ ID NO: 321
  chemically treated genomic DNA (Homo sapiens)

SEQ ID NO: 382 - DNA, 1303 bp, Artificial Sequence; identical to SEQ ID NO: 322
  chemically treated genomic DNA (Homo sapiens)

SEQ ID NO: 383 - DNA, 6621 bp, Artificial Sequence; identical to SEQ ID NO: 269
  chemically treated genomic DNA (Homo sapiens)

SEQ ID NO: 384 - DNA, 6621 bp, Artificial Sequence; identical to SEQ ID NO: 270
  chemically treated genomic DNA (Homo sapiens)

SEQ ID NO: 385 - DNA, 8056 bp, Artificial Sequence
  chemically treated genomic DNA (Homo sapiens)
agtttgtttggttgttttagggtttgttggaattttttttttgtttatgtatttgtgaattattttatgtttgttattattggttttttatagggtgatgtttattagtagtggtgataggttaatttttattattttttatgtggttgaatagttatttttgaattatttttttttttagtaatttttttttttttggattttttgtagttaatttgaaagaataataaggaggtggttggaaatttgttttaaggaattgtttgttttttttttgttggaaattttgtattttggatgtttttgtttttgtttttatttgatttttgtttttgttgatatttaggtgtgatgatttttgttgttagtagagggtatatttattttatttttgtaaatttgaatgtgggtgttgtttagagagggggtggagggaaagatgttttgtagtaaaatttagtatagtgattggttgttttttgtgtttgtggtaaaggtttggaggtaggagtaatttgtaatttttaaagttgaattgtgtagtgtattggatttggaagttattatatttatttaatatttgaatgttgagttgtaaatttaatgggtaataatttattttgaatagtgtatatgttatatatgtattttttttttttgaattgtttttttttttggaggtggtggagggagagaaaagtttatttaaaatgtttttgggtgagggattaaggatgagaagaatgttttttgttttttatgttgtggaataatataaaataaaaaattttgagggaatatatattatatattaaatatagattattttagggagtaaataaattatgtgtggggttgggtaattagttaagttgaagtgtaaataaaatgtgaatatatgtttgtgggttatatatagtgtatttttattagtatttagaaaaaattgtgagttagtgaattaggaaattaatgtttggaaggtagttaaattttaattaatttaagatttttttttttttaaaaaaaggtatggaagtaatatttttttttttttttttgattagaattgatgtattttttgtgtatgattgtatttttaataataaaaggggaaagaggatttggaaaggaattaaatgtttggtttgtttggggaggaaagagttaatggttttttttataagggtttttgttgatttttttggtttggtttataagttttttatttgttttttttaggaagtttggttttgtggtttgggtattttttgttttttttatatttttttgtttagtatttttgattttttttaaatttggtagtttgagattgttgtaaattggtgttatagggtgtaaaggggatttgttttttttgaaatttggttgagaaattgggaattttgtgtgggaggtgtgggggtgggatggtggggtatagattggtagagagtaggtaattttttttttgttttagtttagttttggaataggtagatatattttagggttaaatagatgttttttgtatggggttttatggaagtttgagtaggtggggtaggaggggtggtatttgttgttttggtagtaaattgggggatttagtttgggtggaaggtatttaatttagatagttgtgtatatataatgtataatatatgattttttttaataaatgtaatgggagtttatttataatgtgttttttaagtatatgtggtaatgtgttgttgggttattttaattattttaggtattgtttttttttttatgtttttattatttttttttatttatattaatattttatgttttgaatgtgtgtttattaatattttttttttttttattttttttgggatttttgattaaagtgtggttttttttttagttttagtgaggtgttttgtagtttggtatgtgtgtggtgtggtggtgggtgtgtagtgtgtttttggtgtggagggtagttgttttgtttgtgatgatttatatttataggataaggatgtggtttgttaaataatattgttatggaggagtagtagagaaagggagagggtttgagagggagtaaaagaaaatggtaggtgtgtgtagttaatttatgtggtttttttattttgtttatattttagagttagagtgtttggttgtttggttgagttttttttttattttttttattttttttattttttttataagtgttttttttgggtttttaaagtagagggtgtgggggaaaagaaaaaagatttttttttgttaatttttgtttattggttttttataatgtgagggtttggatggttgaggatttttgagttgtgttgtttgtggttgttattgttgggttttggttgtttttggttttttttttgttttgagaagggtagggttttttagaggtttggtgggaaaaagaatggagggagggattgtgttgagtataaaagttggtttttggggttttatttaatttgttgtagtaattttagtgagaggtagagggagtgagtgggtggttggttagggtggaagagttgggtgagtagagttgtgttgtgggtgttttgggaagggagatttggagtgaatagggggttttgtttttggtttagattttttgttgattttttaggtagtggtttgtaatttttgttgtatttatgaaattttgtttatagtagtgggtggatattttgtattggaattgataatatttgattaaggatgtgatttttttgatgtggggaggttattttgtttatttggggatatttttttgttgttgttaggatttgtttttttgaaaggttttttttgtagttgtttagatattgaattttttttgggaagtggaaaattaggtaagtattgaagtttatttgttttttaatttatttttttattagtttaattttgagatgagttgaatgtttaaatagggtgtttttttttttaattttgtgttattgatattttttttggggtgggggttattttagaattggattggggtatagtgatttgttaagatgggggaggagaagatagagggaaaatgggaatggtttttatgattatttttttgagatttttgttttatgaatatatttatgttgatttttggttggttggatatttttattttattgtgttaattgttttttgggttttggggggtggggggttgttttgtggtgggtagaaagttttttgtattttgagttttttggagaagggattgtatattgtttgtgtgagttagattgttttgtaggtgttgatttgtttttgtttttgggagggtagttaaattttgatttattgtatttttgatagttggagatggatattgtggtgtgttttgtttgtttgtttttgtggtgattttaatttgttttgatttttttaagaagttgatatttggttttttaaaaagtaataaaataatttaaaatttgggtttttagaagtgttaggatgtggtgttgggtaggtgtaggtaggggaaaagggaggtgaggatgtgtttgatttttttgtaattgttgatttggaaaaattagggtgaatttttgtatttagttttgatttttttgttgtggttgtttttgggtgtttttgtgtttgagatgtggaggaattgtgaggagtggggttttgggtggttttaaaatagttgttatttttggtggggtggttttgggggaggtattgtagtggggtttttggtgtagttgtatttttgtattgagtgtgaagggaggtgtttttattattatttgatattttttttgtatttatggaggggtgttaaagtttgtggttgagtttgttattttagttggtgagagaaagaagaaaagttggtaaaaggagtgttggatgggggtagtattgggggtggggatgggggtggtggagagggaaggttgggaggggttgtggtgttggtgggggtaggagagtgtttagggtgtgagtgggaatagttgtagtggaggggttttggtgtggagtggggtttatgtagttgtttttgtttaggtgttttttgtttttttttttaggtggtgtaaaattttgtgttttggattttggtaaattgtattttttattgttattttttgtggttttttaagggtgttagggttgattttgatttttttgttgttgtggggttgatttttgggttttgtgttttgggtttttgggggagtgggggtttggtgggtattaagatgttggtttattaagtgtgtttttgagatagtaggggattgtttaaagggggtgaaagggtgttttttttatttttttattaagattatttagttgttttaggggatagttttgtaaggggagaggtttgggattgtggtgtgtattgtgtgttgtgttaggtttttgtattaagatttttttaatttaagattgttttttgttttgtgtgttttgttttagtagttttttgtgatgatgttttttaatgttagttttattaataggaattatgattttgattatgatttggtgtagttgtatttttattgtgatgaggaggagaatttttattagtagtagtagtagagtgaattgtagtttttggtgtttagtgaggatatttggaagaaatttgagttgttgtttattttgtttttgttttttagttgttgttttgggttttgtttgtttttttatgttgtggttatatttttttttttttggggagataatgatggtggtggtgggagtttttttatggttgattagttggagatggtgattgagttgttgggaggagatatggtgaattagagttttatttgtgatttggatgatgagatttttattaaaaatattattatttaggattgtatgtggagtggttttttggttgttgttaagtttgttttagagaagttggttttttattaggttgtgtgtaaagatagtggtagtttgaattttgtttgtggttatagtgtttgttttatttttagtttgtatttgtaggatttgagtgttgttgttttagagtgtattgattttttggtggtttttttttatttttttaatgatagtagtttgtttaagttttgtgttttgtaagattttagtgttttttttttgtttttggattttttgttttttttgatggagttttttttgtagggtagttttgagtttttggtgttttatgaggagatattgtttattattagtagtgattttggtaagtgaagtttgtttaggtttgttaaaagtgggtggttggatattttttttatttttattggtagtttatttaatgggttatttttattaggaaggagagatagtagatttggagagatttgggagtttattatttttgaaattttgggttttagtgtttttttttattttttttttttagattgtttatgtttgtagtttttttttttgtttgttttttattttttaggaattttatttaggtttttaaattttttggtttattttataatttaatttatttttttttattttttgttaatattttaattgttttggggtggggtggtagggagtgtatgaatgaggataagagaggattgatttttgagagtgaatgaattgttttttttttaatttttgagaagtggtgggatttaatgaattatttataaaaatgaggggttgtgtttagaggttaggtagggtttgtttgagtgtgggagttagtgaattgttttaagagtgggtgggttgaggagttgggatttttttagtttattttgaatattgaaaagtaaatttttgttaaagttggatttttttttttttttatttttttttttgtttttttggatttttggtaaaattgtaattttttttttttttattttttatttttagtaaaatagggagttgttaaagttatattaagtaatttgtagttattatttgtaatatttgaagtgtttttggtaaagttttttaaaaataggaggtgtttgggaatgtgttttgttttgggtgtgtttaaagttttattaagttttaggtaagaattggtattaatgttttattttgggaagttgtattttttttgtttatgttataatttagttgtttttttttttatgagatttttatttttatggtgagaggagtaagggtggttggttagattggttttttttttttttttttttttttttaagatggagttttattttgttattaggttggagtgtagtggtgtaattaatttttaattttttggtttaagagatttttttgttttagttttttaagtagttgggattataggtgtatattattatgttaggttaatttttgtaattttagtagagatggggttttattgtgttggttaggatggttttttttgattttatgatttgtttattttggttttttaaagtgttgggattataggtgtgagttagggtattaggtttagatgtggttttttggggagataattttgtttagagatttttttaatgtatttatgttttgtatttgtatagtattaatttggtaattgattattttaatgtaattttgttaaaggagtgatttttatttttttttttaaagaggaggaataagaagatgaggaagaaattgatgttgtttttgtggaaaagaggtaggtttttggtaaaaggttagagtttggattattttttgttggaggttatagtaaatttttttatagtttattggtttttaagaggtgttatgtttttatatattagtataattatgtagtgtttttttttatttggaaggattattttgttgttaagagggttaagttggatagtgttagagttttgagatagattagtaataattgaaaatgtattagttttaggtttttggatattgaggagaatgttaagaggtgaatatataatgttttggagtgttagaggaggaatgagttaaaatggagtttttttgttttgtgtgattagattttggagttggaaaataatgaaaaggtttttaaggtagttatttttaaaaaagttatagtatatattttgtttgtttaagtagaggagtaaaagtttatttttgaagaggatttgttgtggaaatgatgagaatagttgaaatataaatttgaatagttatggaatttttgtgtgtaaggaaaagtaaggaaaatgattttttttaatagaaatgttttgagtaattgtttatgaatttgttttaaatgtatgattaaatgtaattttataattttggttgagttttgagattgaaagatttagttataatgtaaattgttttaaattggattttgggtataaaagaatttttttatgtttattattttttttttttttttaatagatttgtatttaagaattgtttttaaaaaattttaagatttatataatgtttttttgtaaatattgttattaaatgtaaataattttaataaaatgtttatagtagttatatagaattttaattttagtatatagtatttagtattataggtattataaattttaattttttttatttaagtatattttgttttttaaagttgatttttttttattgtttttagaaaaaataaaataattggtaaatatattattgagttaaattttaagttgtgaatgttttgttttgtttttttttttttttaattattattatttttgtttgtttttattaattgtttttttagagggtggttttaagaaaggtaagagtttttttttgttgaaatgggtttgggggttttaaggtttttaagtttttggaggttttaagatgttttttggagattatgataatagttagagttgatagttagaaggaatggtagaaggtaggtgagaaggtgagaggtaggtaaaggagatataagaggttaaaggtagtagttaagtatataaagaggtataaggattggggagttgggaggaaggtgaggaagaaatttttgttattttagttaattagtgttagttttttgtttattttaaatttaggaatt

SEQ ID NO: 386 - DNA, 8056 bp, Artificial Sequence
  chemically treated genomic DNA (Homo sapiens)
aatttttaaatttaaaataaataaaaaattaatattaattaattaaaataataaaaattttttttttattttttttttaattttttaatttttatatttttttatatatttaattattatttttaattttttatattttttttatttattttttatttttttatttattttttattattttttttaattattaattttaattattattataatttttaaaaaatattttaaaatttttaaaaatttaaaaattttaaaatttttaaatttattttaataaaaaaaaatttttattttttttaaaattattttttaaaaaaataattaataaaaataaataaaaataataataattaaaaaaaaaaaaaaatgaaataaaatatttataatttaaaatttaatttaataatatatttattaattattttattttttttaaaaataataaaaaaaaattaattttaaaaaataaaatatatttaaataaaaaaaattaaaatttataatatttataatattaaatattatatattaaaattaaaattttatataattattataaatgttttattaaaattatttatatttaataataatatttataaaaaaatattatataaattttaaaattttttaaaaataatttttaaatataaatttattaaaaaaaaaaaaaaaataataaatataaaaaaatttttttatatttaaaatttaatttaaaataatttatattataattaaattttttaattttaaaatttaattaaaattataaaattatatttaattatatatttaaaataaatttataaatgattatttaaaatatttttattaaaaaaaattgttttttttatttttttttatgtataaaaattttgtaattatttaaatttatattttaattatttttgttgtttttgtaataaattttttttaaaaataaatttttatttttttatttaaatgaataaaatatatattataatttttttaaaaataattattttaaaaatttttttattattttttaattttgaaatttaattatgtaaaataaaaaaattttgttttaatttgttttttttttaatgttttaaaatgttatatatttgttttttaatattttttttgatatttgaaaatttaaaattaatatatttttgattattattaatttattttaaaattttaatattatttaatttaatttttttaataataaaataatttttttgaataaaaaaaaatgttatgtaattatattaatatataaaaatgtaatattttttaaaaattaataaattataaaaaaatttattataatttttaataaaaaataatttaaattttaattttttattaaaaatttattttttttttataaaaataatattgattttttttttatttttttattttttttttttaaaaaaaaaaataaaaattatttttttaataaaattatattaaaataattaattattaaattaatattatataaatataaaatataaatatgttaaaaaaatttttaaataaaattatttttttaaaaaattatatttaaatttaatattttaatttatatttataattttaatattttaaaaaattgaaataaatgaattgtaaaattaaaaaaaattattttaattaatatgataaaattttatttttattaaaattataaaaattaatttaatataataatatatatttataattttaattatttaaaaaattaaaataaaaaaattttttaaattaaaaaattaaaaattaattatgttattatattttaatttaataataaaataaaattttgttttaaaaaaaaaaaaaaaaaaaaaaaaaattaatttaattaattatttttattttttttattataaaaataaaaattttataaaaaaaaaaataattaaattataatataaataaaaaaaatataattttttaaaataaaatattaatattaatttttatttaaaatttaataaaattttaaatatatttaaaataaaatatatttttaaatattttttatttttaaaaaattttattaaaaatattttaaatattataaataataattataaattatttaatataattttaataattttttattttattaaaaataaaaaataaaaaaaaaaaaaattataattttattaaaaatttaaaaaaatgaaaaaaaaaataaaaaaaaaaaaaaatttaattttaataaaaatttattttttaatatttaaaataaattaaaaaaattttaattttttaatttatttatttttaaaataatttattaatttttgtatttaaataaattttatttaatttttaaatataattttttatttttataaataatttattaaattttattattttttgaaaattaaaaaaaaaataatttatttatttttaaaaattaatttttttttatttttatttatatattttttattattttgttttaaaataattaaaatattaatgaaaaataaaaaaaaataaattaaattataaaataaattaaaaaatttaaaaatttaaataaaatttttaaaaaataaaaaataaatgaaaaaaaaaattataaatataaataatttaaaaaaaaaaaataaaaaaaaatgttaaaatttaaaattttaaaaataataaatttttaaatttttttaaatttattattttttttttttaataaaaataatttgttaaataaattattaataaaaataaaaaaaatatttaattgtttatttttaataaatttaaatgaattttgtttattaaaattgttattaataataaatgatatttttttataaaatattaaaaatttgaaattattttatgaaaaaaattttgttgaaaaaaataaaaaatttgaaaatgaaaaaaaaatgttaaaattttatgaaatgtaaaatttaaatgaattattattgttaaaaaaataaaaaaaaattattgaaaaattgatatattttaaaatgatgatgtttaaattttataaatataaattaaaaataaaataaatgttataattgtgaatgaaatttgaattattgttatttttatgtgtaatttaataaaaaattaatttttttaaaatgaatttaatgatgattgaaaaattgttttatatataattttaaataataatatttttaataaaaattttgttgtttgaattgtaaataaaattttaatttattatatttttttttaataatttgattattatttttaattaattgattgtaaaaaaatttttgttattgttgttgttatttttttgaaaaaaaaaaaatataattgtaatgtaaaaaaatgaataaaatttgaaatgatgattaaaaaataaaaatgaaataaataataatttgaattttttttaaatatttttgttaaatgttgaaaattataatttgttttattattattattaataaaaatttttttttttgttgtaataaaaatatgattatattgaattgtaattgaaattataatttttattaataaaattaatgttaaaaaatattgttgtgaaaaattattaaaatgaaatatataaaatgaaaaataattttaaattaaaaaaattttaatatgaaaatttaatgtaatgtgtaatatgtgttataattttgaatttttttttttataaaattattttttaaaatgattaaataattttaataaaaaaataaaaaaaatatttttttattttttttaaataattttttattattttgaaaatgtatttaataaattaatgttttaatatttgttgaatttttgtttttttgaaaatttgaaatgtaaaatttgaaaattgattttgtaatgataaaaaaattgaaattgattttaatgtttttaaaaaattgtgaaaaataatgataaaaaatataatttattaaaatttaaaatataaaattttatgttatttaaaaaaaaaaatgaaaaatgtttaaatgaaaatgattatgtaaattttgttttgtgttgaaatttttttgttatgattatttttatttgtgttttaaatgtttttttatttttgttgatattgtaattttttttaattttttttttttattgtttttgtttttatttttaatattatttttgtttaatattttttttattaatttttttttttttttttgttgattaaaataatgaatttaattgtgaattttaatatttttttataaatataaaaaaaatattaaataataataaaaatatttttttttgtatttaatatgaaaatataattatgttaaaaattttgttatgatattttttttgaaattattttattaaaaataataattattttaaaattgtttaaaattttgttttttgtaatttttttgtattttgaatgtgaaaatatttgaaaatgattgtgataaaaaaattaaaattaaatatgaaaatttgttttaatttttttaaattaatgattataaaaaaattgaatatatttttgtttttttttttttttatttatgtttatttaatattatgttttaatatttttaaaaatttaaattttaaattattttattattttttaaaaaattaaatattaattttttaaaaaaattaaaatgaattaaaattgttgtgaaaataaatgaatgaaatgtgttgtaatatttgtttttgattattaaaaatatgataaattgaaatttaattatttttttgaaaatgaaaataaattaatgtttatgaaatgatttaatttatataaatgatatatgattttttttttaaaaaatttaaaatataaaaaattttttatttattgtaaaataattttttgttttttaaaatttaaaaaataattaatataataaaataaaaatatttgattgattgaaaattgatgtaaatatatttataaaataaaaattttgaaaaaataattgtaaaaattatttttgttttttttttattttttttttttttattttaataaattattatattttgatttaattttaaaataatttttattttgaaaaaaatattaataatgtaaaattaaaaaaaaaaatattttatttaaatatttgatttattttaaaattaaattaataaaaaaataaattaaaaaataaataaattttgatatttatttaattttttattttttgaaaaaaatttaatatttaaataattataaaaaaaattttttaaaaaaatgaattttaataatgatgaaaaaatatttttaaataaataaaataatttttttgtgttgaaaaaattgtgtttttaattgaatattattaattttaatataaaatatttgtttgttattataaataaaattttgtaaatatgataaaaattatgaattgttatttaaaaaattaatgaaaaatttaaattaaaaatgaaattttttatttgttttgaatttttttttttaaaatgtttgtaatgtaattttatttgtttgatttttttattttaattgattgtttgtttgttttttttattttttattaaaattattataatgaattaaataaaattttgaaaattgatttttatatttaatgtgatttttttttttgtttttttttttgttaaatttttaaaaaattttattttttttgaaataaaaaaaaaattaaaaatgattgaaatttgatgataatgattgtgaataatataatttgaaaatttttaattgtttaaatttttgtattataaaaaattgataaatgaaaattaatgaaaaaaaattttttttttttttttttatgttttttattttaaaaatttgaaaaaaatgtttataaaaaaaataaaaaaaataaaaaaaataaaaaaaaaatttaattgaataattgaatattttaattttaaaatataaataaaataaaaaaattgtataaattaattatgtgtgtttattatttttttttatttttttttaaattttttttttttttttattatttttttgtaataatattatttaataaattgtatttttattttataaatataaattattgtaaatgaaataattattttttatattgaaaatgtattatgtgtttattgttatgttatgtgtgtattaaattataaaatgttttgttaaaattaaaaaaaaaattgtgttttaattaaaaattttaaaaaaaataaaaaaaaaaaaaatattaataaatgtgtgtttaaaatgtaaaatattaatataaataaaaaaaaataataaaaatataaaaaaaaaaatgatatttaaaataattaaaataatttaataatgtattattatgtatatttaaaaaatgtgttataaataaatttttattatatttattaaaaaaaattatatattatatattatatatatataattatttaaattaaatattttttatttaaattaaattttttaatttattattaaaataataaatattgttttttttattttgtttatttaaatttttgtaaaattttgtatgaaaaatgtttatttaattttaaaatatatttatttattttaaaattaaattaaaatgaaaaaaaaattatttattttttattaatttatattttattgttttatttttatgttttttatatgaaatttttaattttttaattaaattttaaaaaaaataaattttttttatgttttataatgttgatttataataattttgaattattgaatttaaaaaaaattaaaaatattaaatgaaaaaatataaaaaaaataaaaaatatttgaattgtgaaattgaattttttaaaaaaaataaataaaaaatttataaattgaattgaaaaaattaataaaaatttttataaaaaaaattgttaatttttttttttttgaataaattgaatgtttaatttttttttaaattttttttttttttttattattaaaaatatgattatatataaaaaatatattgattttaattaaaaaaaaaaaaaaaaatattatttttgtatttttttttaaaaaaaaaaaaattttaaattaattaaaatttaattattttttaaatattaattttttaatttattaatttataattttttttaaatattaataaaaatatattatatataatttgtaaatgtatatttatattttatttatgttttgatttaattaattatttaattttatatataatttatttattttttaaaataatttatatttaatatataatatatatttttttgaaattttttattttatattattttatgatataaaaaataaaaaatattttttttatttttaattttttatttaaaaatattttaaataaatttttttttttttttattatttttaaaaaaaaaaataatttgaaaaaaaaaaatatgtatataatatatatgttatttaaaataaattattatttgttaaatttataatttaatgtttaaatattaaataaatataataatttttaaatttgatatattatataatttaattttaaaaattataaattatttttatttttaaatttttattgtaaatgtgaaaaataattaattgttatattaaattttattataaaatgtttttttttttgttttttttttaaataatatttgtgtttaaatttatgaaaataaaataaatatattttttattaataataaaaattattgtgtttaaatattaatgaaaatgaaaattaaataaaaataaaaataaaaatgtttgaaatataaaatttttaatgaaaaaaaaataaatgattttttaaaataaatttttaattatttttttattatttttttaaattaattataaaaaatttgaaaaaaaaaaaattattaaaaaaaaaaataatttaaaaataattatttaattgtataaaaaataataaaaattaatttattattattattaataaatattattttataaaaaattgataataataaatgtaaaataatttataaatatataaatgaaaaaaaaattttaataaattttaaaatgattaaataaatt

SEQ ID NO: 387 - DNA, 28 bp, Artificial Sequence
  Detection primer for MDR1
taaaaactatcccataataactcccaac

SEQ ID NO: 388 - DNA, 28 bp, Artificial Sequence
  Detection primer for MDR1
taagtatgttgaagaaagattattgtag

SEQ ID NO: 389 - DNA, 20 bp, Artificial Sequence
  Detection primer for CSNK2B
ggggaaatggagaagtgtaa

SEQ ID NO: 390 - DNA, 20 bp, Artificial Sequence
  Detection primer for CSNK2B
ctaccaatcccaaaataacc

SEQ ID NO: 391 - DNA, 20 bp, Artificial Sequence
  Detection primer for EGR4
cccaaacataaacacaaaat

SEQ ID NO: 392 - DNA, 20 bp, Artificial Sequence
  Detection primer for EGR4
agggggattgagtgttaagt

SEQ ID NO: 393 - DNA, 20 bp, Artificial Sequence
  Detection primer for AR
gtagtagtagtagtaagaga

SEQ ID NO: 394 - DNA, 20 bp, Artificial Sequence
  Detection primer for AR
accccctaaataattatcct

SEQ ID NO: 395 - DNA, 22 bp, Artificial Sequence
  Detection primer for CDK 4
ggtagttggttatatggtgagg

SEQ ID NO: 396 - DNA, 23 bp, Artificial Sequence
  Detection primer for CDK 4
tcacactcttaaaaaccacaaaa

SEQ ID NO: 397 - DNA, 20 bp, Artificial Sequence
  Detection primer for Humos
tgattgggagtaggtgtgtt

SEQ ID NO: 398 - DNA, 21 bp, Artificial Sequence
  Detection primer for Humos
caaatcttccaacttctcaaa

SEQ ID NO: 399 - DNA, 23 bp, Artificial Sequence
  Detection primer for RB1
tttaagtttgtttttgttttggt

SEQ ID NO: 400 - DNA, 22 bp, Artificial Sequence
  Detection primer for RB1
tcctactctaaatcctcctcaa

SEQ ID NO: 401 - DNA, 22 bp, Artificial Sequence
  Detection primer for CDC25A
ttgggagtttttattgattttt

SEQ ID NO: 402 - DNA, 23 bp, Artificial Sequence
  Detection primer for CDC25A
acaacctaaaaattaaatccaaa

SEQ ID NO: 403 - DNA, 22 bp, Artificial Sequence
  Detection primer for GPIb beta
ggtgataggagaataatgttgg

SEQ ID NO: 404 - DNA, 20 bp, Artificial Sequence
  Detection primer for GPIb beta
tctcccaactacaaccaaac

SEQ ID NO: 405 - DNA, 24 bp, Artificial Sequence
  Detection primer for MYOD1
attaggggtatagaggagtattga

SEQ ID NO: 406 - DNA, 22 bp, Artificial Sequence
  Detection primer for MYOD1
cttacaaacccacaataaacaa

SEQ ID NO: 407 - DNA, 20 bp, Artificial Sequence
  Detection primer for CDH3
gtttagaagtttaagattag

SEQ ID NO: 408 - DNA, 20 bp, Artificial Sequence
  Detection primer for CDH3
caaaaactcaacctctatct

SEQ ID NO: 409 - DNA, 19 bp, Artificial Sequence
  Detection primer for WT1
taactaccctcaacttccc

SEQ ID NO: 410 - DNA, 20 bp, Artificial Sequence
  Detection primer for WT1
aaagggaaattaagtgttgt

SEQ ID NO: 411 - DNA, 20 bp, Artificial Sequence
  Detection primer for MYCL1
aggtttgggttattgagttt

SEQ ID NO: 412 - DNA, 27 bp, Artificial Sequence
  Detection primer for MYCL1
cattatttcctaactaccttatatctc

SEQ ID NO: 413 - DNA, 20 bp, Artificial Sequence
  Detection primer for ABL1
accaatccaaacttttcctt

SEQ ID NO: 414 - DNA, 22 bp, Artificial Sequence
  Detection primer for ABL1
ggttgggagatttaattttatt

SEQ ID NO: 415 - DNA, 24 bp, Artificial Sequence
  Detection primer for ELK1
aagtgttttagtttttaatgggta

SEQ ID NO: 416 - DNA, 20 bp, Artificial Sequence
  Detection primer for ELK1
caaacccaaaactcacctat

SEQ ID NO: 417 - DNA, 18 bp, Artificial Sequence
  Detection primer for ABL1
gttaggagggggttaagg

SEQ ID NO: 418 - DNA, 20 bp, Artificial Sequence
  Detection primer for ABL1
ccaacttcaaacaaatctcc

SEQ ID NO: 419 - DNA, 22 bp, Artificial Sequence
  Detection primer for APC
tcaactaccatcaacttcctta

SEQ ID NO: 420 - DNA, 25 bp, Artificial Sequence
  Detection primer for APC
aatttatttttagtgttgtagtggg

SEQ ID NO: 421 - DNA, 20 bp, Artificial Sequence
  Detection primer for ARHI
gtgagtttttggggtgttta

SEQ ID NO: 422 - DNA, 25 bp, Artificial Sequence
  Detection primer for ARHI
tcaatcttactttcacactacataa

SEQ ID NO: 423 - DNA, 22 bp, Artificial Sequence
  Detection primer for BCL2
gtattttatgttaagggggaaa

SEQ ID NO: 424 - DNA, 18 bp, Artificial Sequence
  Detection primer for BCL2
aaaaaccacaatcctccc

SEQ ID NO: 425 - DNA, 21 bp, Artificial Sequence
  Detection primer for CCND2
ttttggtatgtaggttggatg

SEQ ID NO: 426 - DNA, 21 bp, Artificial Sequence
  Detection primer for CCND2
cctaacctccttcctttaact

SEQ ID NO: 427 - DNA, 21 bp, Artificial Sequence
  Detection primer for CDH1
caaataaaccctcaaccaatc

SEQ ID NO: 428 - DNA, 18 bp, Artificial Sequence
  Detection primer for CDH1
tggagggggtaggaaagt

SEQ ID NO: 429 - DNA, 21 bp, Artificial Sequence
  Detection primer for CDKN1A
ggattagtgggaatagaggtg

SEQ ID NO: 430 - DNA, 21 bp, Artificial Sequence
  Detection primer for CDKN1A
aaacccaaactcctaactacc

SEQ ID NO: 431 - DNA, 19 bp, Artificial Sequence
  Detection primer for CDKN1B (p27 Kip1)
gtggggaggtagttgaaga

SEQ ID NO: 432 - DNA, 20 bp, Artificial Sequence
  Detection primer for CDKN1B (p27 Kip1)
atacacccctaacccaaaat

SEQ ID NO: 433 - DNA, 20 bp, Artificial Sequence
  Detection primer for CDKN2a
ttgaaaattaagggttgagg

SEQ ID NO: 434 - DNA, 20 bp, Artificial Sequence
  Detection primer for CDKN2a
caccctctaataaccaacca

SEQ ID NO: 435 - DNA, 20 bp, Artificial Sequence
  Detection primer for CDKN2a
ggggttggttggttattaga

SEQ ID NO: 436 - DNA, 20 bp, Artificial Sequence
  Detection primer for CDKN2a
aaccctctacccacctaaat

SEQ ID NO: 437 - DNA, 22 bp, Artificial Sequence
  Detection primer for CDKN2B
ggttggttgaaggaatagaaat

SEQ ID NO: 438 - DNA, 22 bp, Artificial Sequence
  Detection primer for CDKN2B
cccactaaacatacccttattc

SEQ ID NO: 439 - DNA, 22 bp, Artificial Sequence
  Detection primer for DAPK1
aaccctttcttcaaattacaaa

SEQ ID NO: 440 - DNA, 21 bp, Artificial Sequence
  Detection primer for DAPK1
tgattgggttttagggaaata

SEQ ID NO: 441 - DNA, 22 bp, Artificial Sequence
  Detection primer for FOS
tttttggggtttagtttagaat

SEQ ID NO: 442 - DNA, 19 bp, Artificial Sequence
  Detection primer for FOS
aaccttcatcccctaacct

SEQ ID NO: 443 - DNA, 19 bp, Artificial Sequence
  Detection primer for GSTP1
atttgggaaagagggaaag

SEQ ID NO: 444 - DNA, 21 bp, Artificial Sequence
  Detection primer for GSTP1
taaaaactctaaaccccatcc

SEQ ID NO: 445 - DNA, 20 bp, Artificial Sequence
  Detection primer for HIC-1
tgggttggagaagaagttta

SEQ ID NO: 446 - DNA, 21 bp, Artificial Sequence
  Detection primer for HIC-1
tcatatttccaaaaacacacc

SEQ ID NO: 447 - DNA, 20 bp, Artificial Sequence
  Detection primer for IGF2
cccttccccttaactaaact

SEQ ID NO: 448 - DNA, 19 bp, Artificial Sequence
  Detection primer for IGF2
aatttgggttaggtttgga

SEQ ID NO: 449 - DNA, 22 bp, Artificial Sequence
  Detection primer for MGMT
aaggttttagggaagagtgttt

SEQ ID NO: 450 - DNA, 23 bp, Artificial Sequence
  Detection primer for MGMT
accttttcctatcacaaaaataa

SEQ ID NO: 451 - DNA, 20 bp, Artificial Sequence
  Detection primer for MLH1
taaggggagaggaggagttt

SEQ ID NO: 452 - DNA, 22 bp, Artificial Sequence
  Detection primer for MLH1
accaattctcaatcatctcttt

SEQ ID NO: 453 - DNA, 19 bp, Artificial Sequence
  Detection primer for MOS
accctacaacaatccctca

SEQ ID NO: 454 - DNA, 22 bp, Artificial Sequence
  Detection primer for MOS
tggtttttaggttattggattt

SEQ ID NO: 455 - DNA, 21 bp, Artificial Sequence
  Detection primer for MPL
tggggagattgatttgagtat

SEQ ID NO: 456 - DNA, 23 bp, Artificial Sequence
  Detection primer for MPL
aattccttcaataacataccctt

SEQ ID NO: 457 - DNA, 22 bp, Artificial Sequence
  Detection primer for MYC
agagggagtaaaagaaaatggt

SEQ ID NO: 458 - DNA, 22 bp, Artificial Sequence
  Detection primer for MYC
ccaaataaacaaaataacctcc

SEQ ID NO: 459 - DNA, 22 bp, Artificial Sequence
  Detection primer for N33
ttttagattgaggttttagggt

SEQ ID NO: 460 - DNA, 22 bp, Artificial Sequence
  Detection primer for N33
atccattctacctcctttttct

SEQ ID NO: 461 - DNA, 22 bp, Artificial Sequence
  Detection primer for PMS2
gattgagattattttgggtttt

SEQ ID NO: 462 - DNA, 21 bp, Artificial Sequence
  Detection primer for PMS2
acttaaaccttccctctccac

SEQ ID NO: 463 - DNA, 26 bp, Artificial Sequence
  Detection primer for PTEN
ttttaggtagttatattgggtatgtt

SEQ ID NO: 464 - DNA, 21 bp, Artificial Sequence
  Detection primer for PTEN
tcaactctcaaacttccatca

SEQ ID NO: 465 - DNA, 18 bp, Artificial Sequence
  Detection primer for RBL2
gaaaatgggtgtgtgtgg

SEQ ID NO: 466 - DNA, 22 bp, Artificial Sequence
  Detection primer for RBL2
tacaaataaaaacaaatcccct

SEQ ID NO: 467 - DNA, 19 bp, Artificial Sequence
  Detection primer for SFN
ctatccaacaaacccaaca

SEQ ID NO: 468 - DNA, 20 bp, Artificial Sequence
  Detection primer for SFN
gaagagaggagagggaggta

SEQ ID NO: 469 - DNA, 22 bp, Artificial Sequence
  Detection primer for TGFBR2
gtaatttgaagaaagttgaggg

SEQ ID NO: 470 - DNA, 22 bp, Artificial Sequence
  Detection primer for TGFBR2
ccaacaactaaacaaaacctct

SEQ ID NO: 471 - DNA, 25 bp, Artificial Sequence
  Detection primer for TP73
gaaaaacctctaaaaactactctcc

SEQ ID NO: 472 - DNA, 24 bp, Artificial Sequence
  Detection primer for TP73
agtaaatagtgggtgagttatgaa

SEQ ID NO: 473 - DNA, 22 bp, Artificial Sequence
  Detection primer for CDKN1C
ggggaggtagatatttggataa

SEQ ID NO: 474 - DNA, 23 bp, Artificial Sequence
  Detection primer for CDKN1C
aactacaccatttatattcccac

SEQ ID NO: 475 - DNA, 22 bp, Artificial Sequence
  Detection primer for GSK3
taagtgataaaggaaggaagga

SEQ ID NO: 476 - DNA, 18 bp, Artificial Sequence
  Detection primer for GSK3
ccttcaaaccccaaacaa

SEQ ID NO: 477 - DNA, 25 bp, Artificial Sequence
  Detection primer for CDC2
attagaagtgaaagtaatggaattt

SEQ ID NO: 478 - DNA, 19 bp, Artificial Sequence
  Detection primer for CDC2
tcaatttccaaaaaccaac

SEQ ID NO: 479 - DNA, 22 bp, Artificial Sequence
  Detection primer for ESR1
agggggaattaaatagaaagag

SEQ ID NO: 480 - DNA, 22 bp, Artificial Sequence
  Detection primer for ESR1
caataaaaccatcccaaatact

SEQ ID NO: 481 - DNA, 23 bp, Artificial Sequence
  Detection primer for APAF1
agatatgtttggagattttagga

SEQ ID NO: 482 - DNA, 22 bp, Artificial Sequence
  Detection primer for APAF1
aactccccacctctaattctat

SEQ ID NO: 483 - DNA, 22 bp, Artificial Sequence
  Detection primer for BAK1
aattagggatgggaaaagtagt

SEQ ID NO: 484 - DNA, 22 bp, Artificial Sequence
  Detection primer for BAK1
aaacataacaaaatcaaatccc

SEQ ID NO: 485 - DNA, 25 bp, Artificial Sequence
  Detection primer for BAX
aaataaatagaaaagtaggtttggc

SEQ ID NO: 486 - DNA, 23 bp, Artificial Sequence
  Detection primer for BAX
ttctacccctcaatacttaaaaa

SEQ ID NO: 487 - DNA, 22 bp, Artificial Sequence
  Detection primer for CASP10
tcttcccaaacaaataaaaact

SEQ ID NO: 488 - DNA, 22 bp, Artificial Sequence
  Detection primer for CASP10
gttttgaggttaaatgagtggt

SEQ ID NO: 489 - DNA, 22 bp, Artificial Sequence
  Detection primer for CASP8
agtggatttggagtttagatgt

SEQ ID NO: 490 - DNA, 22 bp, Artificial Sequence
  Detection primer for CASP8
aacaaaataaaaacttctccca

SEQ ID NO: 491 - DNA, 22 bp, Artificial Sequence
  Detection primer for CASP9
ggaagagttgtaggtggattag

SEQ ID NO: 492 - DNA, 22 bp, Artificial Sequence
  Detection primer for CASP9
ccacattttcccaataaatact

SEQ ID NO: 493 - DNA, 22 bp, Artificial Sequence
  Detection primer for TCL1A
ccacaacacatcaaacctataa

SEQ ID NO: 494 - DNA, 19 bp, Artificial Sequence
  Detection primer for TCL1A
tttggtggtaagtgagggt

SEQ ID NO: 495 - DNA, 22 bp, Artificial Sequence
  Detection primer for PML
aattcccaaacaaacttttaca

SEQ ID NO: 496 - DNA, 22 bp, Artificial Sequence
  Detection primer for PML
tggagaggaagtgagatagaag

SEQ ID NO: 497 - DNA, 23 bp, Artificial Sequence
  Detection primer for HOXA5
gaagggggaaagttatttagtta

SEQ ID NO: 498 - DNA, 20 bp, Artificial Sequence
  Detection primer for HOXA5
aaaccccaaacaacctctat

SEQ ID NO: 499 - DNA, 21 bp, Artificial Sequence
  Detection primer for SDC4
cctaactaccctcattccttt

SEQ ID NO: 500 - DNA, 22 bp, Artificial Sequence
  Detection primer for SDC4
agttggggaaattaaggtttag

SEQ ID NO: 501 - DNA, 23 bp, Artificial Sequence
  Detection primer for PITX2
tcctcaactctacaaacctaaaa

SEQ ID NO: 502 - DNA, 21 bp, Artificial Sequence
  Detection primer for PITX2
gtaggggagggaagtagatgt

SEQ ID NO: 503 - DNA, 26 bp, Artificial Sequence
  Detection primer for GPR37
acttatttttcttttcctctaaaaac

SEQ ID NO: 504 - DNA, 22 bp, Artificial Sequence
  Detection primer for GPR37
tatggtttggtgagggtatatt

SEQ ID NO: 505 - DNA, 22 bp, Artificial Sequence
  Detection primer for PRAME
accactcaaaaacaaaccttta

SEQ ID NO: 506 - DNA, 22 bp, Artificial Sequence
  Detection primer for PRAME
atgggtatggtggttaagagta

SEQ ID NO: 507 - DNA, 20 bp, Artificial Sequence
  Detection primer for CDK 4
aaaaataacacaataactca

SEQ ID NO: 508 - DNA, 20 bp, Artificial Sequence
  Detection primer for CDK 4
ttttggtagttggttatatg

SEQ ID NO: 509 - DNA, 20 bp, Artificial Sequence
  Detection primer for CDC25A
aaaattaaatccaaacaaac

SEQ ID NO: 510 - DNA, 20 bp, Artificial Sequence
  Detection primer for CDC25A
agaagttgtttattgattgg

SEQ ID NO: 511 - DNA, 20 bp, Artificial Sequence
  Detection primer for CSNK2B
ctaccaatcccaaaataacc

SEQ ID NO: 512 - DNA, 20 bp, Artificial Sequence
  Detection primer for CSNK2B
ggggaaatggagaagtgtaa

SEQ ID NO: 513 - DNA, 27 bp, Artificial Sequence
  Detection primer for C-ABL
atcccaaactaaaaaaaacaaaccacc

SEQ ID NO: 514 - DNA, 10 bp, Artificial Sequence
  Detection primer for C-ABL
atttattttg

SEQ ID NO: 515 - DNA, 19 bp, Artificial Sequence
  Detection primer for L-MYC
aaacccaaaaactaaaaaa

SEQ ID NO: 516 - DNA, 24 bp, Artificial Sequence
  Detection primer for L-MYC
atgttatttaggtttgggttattg

SEQ ID NO: 517 - DNA, 20 bp, Artificial Sequence
  Detection primer for CSF1
tataaaaaatcaccctaacc

SEQ ID NO: 518 - DNA, 13 bp, Artificial Sequence
  Detection primer for CSF1
gagaatggggtgg

SEQ ID NO: 519 - DNA, 10 bp, Artificial Sequence
  Detection primer for Me491/TD63
acctaaatca

SEQ ID NO: 520 - DNA, 20 bp, Artificial Sequence
  Detection primer for Me491/TD63
atgtgagttagggatttttt

SEQ ID NO: 521 - DNA, 20 bp, Artificial Sequence
  Detection primer for CD1R3
acaaaaacaacaaacacccc

SEQ ID NO: 522 - DNA, 20 bp, Artificial Sequence
  Detection primer for CD1R3
attatggttggaattgtaat

SEQ ID NO: 523 - DNA, 11 bp, Artificial Sequence
  Detection primer for N-MYC
aaaatatcctc

SEQ ID NO: 524 - DNA, 17 bp, Artificial Sequence
  Detection primer for N-MYC
gggaggagtatattttg

SEQ ID NO: 525 - DNA, 15 bp, Artificial Sequence
  Detection primer for Tubulin
cttatataccctccc

SEQ ID NO: 526 - DNA, 19 bp, Artificial Sequence
  Detection primer for Tubulin
gggtttagagttaagattg

SEQ ID NO: 527 - DNA, 20 bp, Artificial Sequence
  Detection primer for CMYCex3
ttcaatctcaaaactcaacc

SEQ ID NO: 528 - DNA, 20 bp, Artificial Sequence
  Detection primer for CMYCex3
aggaggaataagaagatgag

SEQ ID NO: 529 - DNA, 20 bp, Artificial Sequence
  Detection primer for ELK1
gaaaaaaaaaaacccaatat

SEQ ID NO: 530 - DNA, 15 bp, Artificial Sequence
  Detection primer for ELK1
atggttttgtttaat

SEQ ID NO: 531 - DNA, 20 bp, Artificial Sequence
  Detection primer for AR
accccctaaataattatcct

SEQ ID NO: 532 - DNA, 20 bp, Artificial Sequence
  Detection primer for AR
gtagtagtagtagtaagaga

SEQ ID NO: 533 - DNA, 20 bp, Artificial Sequence
  Detection primer for Humos
ctaattttacaaacatccta

SEQ ID NO: 534 - DNA, 20 bp, Artificial Sequence
  Detection primer for Humos
tttattgattgggagtaggt

SEQ ID NO: 535 - DNA, 18 bp, Artificial Sequence
  Detection oligonucleotide for MDR1
ttggtggtcgttttaagg

SEQ ID NO: 536 - DNA, 18 bp, Artificial Sequence
  Detection oligonucleotide for MDR1
ttggtggttgttttaagg

SEQ ID NO: 537 - DNA, 18 bp, Artificial Sequence
  Detection oligonucleotide for MDR1
ttgaaagacgtgtttata

SEQ ID NO: 538 - DNA, 18 bp, Artificial Sequence
  Detection oligonucleotide for MDR1
ttgaaagatgtgtttata

SEQ ID NO: 539 - DNA, 18 bp, Artificial Sequence
  Detection oligonucleotide for MDR1
aggtgtaacggaagttag

SEQ ID NO: 540 - DNA, 18 bp, Artificial Sequence
  Detection oligonucleotide for MDR1
aggtgtaatggaagttag

SEQ ID NO: 541 - DNA, 18 bp, Artificial Sequence
  Detection oligonucleotide for MDR1
tagtttttcgaggaatta

SEQ ID NO: 542 - DNA, 18 bp, Artificial Sequence
  Detection oligonucleotide for MDR1
tagttttttgaggaatta

SEQ ID NO: 543 - DNA, 18 bp, Artificial Sequence
  Detection oligonucleotide for CSNK2B
gagagttgcggaaagaga

SEQ ID NO: 544 - DNA, 18 bp, Artificial Sequence
  Detection oligonucleotide for CSNK2B
gagagttgtggaaagaga

SEQ ID NO: 545 - DNA, 16 bp, Artificial Sequence
  Detection oligonucleotide for CSNK2B
gggttttcgtgatagt

SEQ ID NO: 546 - DNA, 16 bp, Artificial Sequence
  Detection oligonucleotide for CSNK2B
gggtttttgtgatagt

SEQ ID NO: 547 - DNA, 18 bp, Artificial Sequence
  Detection oligonucleotide for CSNK2B
taggttagcgtattggga

SEQ ID NO: 548 - DNA, 18 bp, Artificial Sequence
  Detection oligonucleotide for CSNK2B
taggttagtgtattggga

SEQ ID NO: 549 - DNA, 18 bp, Artificial Sequence
  Detection oligonucleotide for EGR4
aataataacgttatagtt

SEQ ID NO: 550 - DNA, 18 bp, Artificial Sequence
  Detection oligonucleotide for EGR4
aataataatgttatagtt

SEQ ID NO: 551 - DNA, 18 bp, Artificial Sequence
  Detection oligonucleotide for EGR4
ggagttttcggtatatat

SEQ ID NO: 552 - DNA, 18 bp, Artificial Sequence
  Detection oligonucleotide for EGR4
ggagtttttggtatatat

SEQ ID NO: 553 - DNA, 18 bp, Artificial Sequence
  Detection oligonucleotide for AR
tgttatttcgagagaggt

SEQ ID NO: 554 - DNA, 18 bp, Artificial Sequence
  Detection oligonucleotide for AR
tgttattttgagagaggt

SEQ ID NO: 555 - DNA, 18 bp, Artificial Sequence
  Detection oligonucleotide for AR
agaggttgcgttttagag

SEQ ID NO: 556 - DNA, 18 bp, Artificial Sequence
  Detection oligonucleotide for AR
agaggttgtgttttagag

SEQ ID NO: 557 - DNA, 18 bp, Artificial Sequence
  Detection oligonucleotide for AR
ggaggtttcgggggtttt

SEQ ID NO: 558 - DNA, 18 bp, Artificial Sequence
  Detection oligonucleotide for AR
ggaggttttgggggtttt

SEQ ID NO: 559 - DNA, 18 bp, Artificial Sequence
  Detection oligonucleotide for CDK 4
gtatggggtcgtaggaat

SEQ ID NO: 560 - DNA, 18 bp, Artificial Sequence
  Detection oligonucleotide for CDK 4
gtatggggttgtaggaat

SEQ ID NO: 561 - DNA, 18 bp, Artificial Sequence
  Detection oligonucleotide for CDK 4
ggaagggtcgtttaaggg

SEQ ID NO: 562 - DNA, 18 bp, Artificial Sequence
  Detection oligonucleotide for CDK 4
ggaagggttgtttaaggg

SEQ ID NO: 563 - DNA, 16 bp, Artificial Sequence
  Detection oligonucleotide for CDK 4
gggttggcgtgaggta

SEQ ID NO: 564 - DNA, 16 bp, Artificial Sequence
  Detection oligonucleotide for CDK 4
gggttggtgtgaggta

SEQ ID NO: 565 - DNA, 18 bp, Artificial Sequence
  Detection oligonucleotide for CDK 4
aggattttcgatgtaagg

SEQ ID NO: 566 - DNA, 18 bp, Artificial Sequence
  Detection oligonucleotide for CDK 4
aggatttttgatgtaagg

SEQ ID NO: 567 - DNA, 18 bp, Artificial Sequence
  Detection oligonucleotide for CDK 4
gggttttacgtggttgga

SEQ ID NO: 568 - DNA, 18 bp, Artificial Sequence
  Detection oligonucleotide for CDK 4
gggttttatgtggttgga

SEQ ID NO: 569 - DNA, 18 bp, Artificial Sequence
  Detection oligonucleotide for Humos
tatggagttcggtggtaa

SEQ ID NO: 570 - DNA, 18 bp, Artificial Sequence
  Detection oligonucleotide for Humos
tatggagtttggtggtaa

SEQ ID NO: 571 - DNA, 18 bp, Artificial Sequence
  Detection oligonucleotide for Humos
tttattgtcgtattggag

SEQ ID NO: 572 - DNA, 18 bp, Artificial Sequence
  Detection oligonucleotide for Humos
tttattgttgtattggag

SEQ ID NO: 573 - DNA, 18 bp, Artificial Sequence
  Detection oligonucleotide for Humos
gttgtgaacggtttgttt

SEQ ID NO: 574 - DNA, 18 bp, Artificial Sequence
  Detection oligonucleotide for Humos
gttgtgaatggtttgttt

SEQ ID NO: 575 - DNA, 18 bp, Artificial Sequence
  Detection oligonucleotide for RB1
ttagatttcgggataggg

SEQ ID NO: 576 - DNA, 18 bp, Artificial Sequence
  Detection oligonucleotide for RB1
ttagattttgggataggg

SEQ ID NO: 577 - DNA, 18 bp, Artificial Sequence
  Detection oligonucleotide for RB1
tatagtttcgttaagtgt

SEQ ID NO: 578 - DNA, 18 bp, Artificial Sequence
  Detection oligonucleotide for RB1
tatagttttgttaagtgt

SEQ ID NO: 579 - DNA, 18 bp, Artificial Sequence
  Detection oligonucleotide for RB1
gtgtatttcggtttggag

SEQ ID NO: 580 - DNA, 18 bp, Artificial Sequence
  Detection oligonucleotide for RB1
gtgtattttggtttggag

SEQ ID NO: 581 - DNA, 18 bp, Artificial Sequence
  Detection oligonucleotide for RB1
ttggaaggcgtttggatt

SEQ ID NO: 582 - DNA, 18 bp, Artificial Sequence
  Detection oligonucleotide for RB1
ttggaaggtgtttggatt

SEQ ID NO: 583 - DNA, 18 bp, Artificial Sequence
  Detection oligonucleotide for RB1
tggatttacgttaggttt

SEQ ID NO: 584 - DNA, 18 bp, Artificial Sequence
  Detection oligonucleotide for RB1
tggatttatgttaggttt

SEQ ID NO: 585 - DNA, 18 bp, Artificial Sequence
  Detection oligonucleotide for CDC25A
gtgtaggtcggtttggtt

SEQ ID NO: 586 - DNA, 18 bp, Artificial Sequence
  Detection oligonucleotide for CDC25A
gtgtaggttggtttggtt

SEQ ID NO: 587 - DNA, 18 bp, Artificial Sequence
  Detection oligonucleotide for CDC25A
ttgttattcggagttggg

SEQ ID NO: 588 - DNA, 18 bp, Artificial Sequence
  Detection oligonucleotide for CDC25A
ttgttatttggagttggg

SEQ ID NO: 589 - DNA, 18 bp, Artificial Sequence
  Detection oligonucleotide for CDC25A
ggagaatagcgaagatag

SEQ ID NO: 590 - DNA, 18 bp, Artificial Sequence
  Detection oligonucleotide for CDC25A
ggagaatagtgaagatag

SEQ ID NO: 591 - DNA, 16 bp, Artificial Sequence
  Detection oligonucleotide for CDC25A
gaaaggtcggtttggt

SEQ ID NO: 592 - DNA, 16 bp, Artificial Sequence
  Detection oligonucleotide for CDC25A
gaaaggttggtttggt

SEQ ID NO: 593 - DNA, 18 bp, Artificial Sequence
  Detection oligonucleotide for GPIb beta
tttgagagcgggtgggag

SEQ ID NO: 594 - DNA, 18 bp, Artificial Sequence
  Detection oligonucleotide for GPIb beta
tttgagagtgggtgggag

SEQ ID NO: 595 - DNA, 18 bp, Artificial Sequence
  Detection oligonucleotide for GPIb beta
gtgggagcggaagtttga

SEQ ID NO: 596 - DNA, 18 bp, Artificial Sequence
  Detection oligonucleotide for GPIb beta
gtgggagtggaagtttga

SEQ ID NO: 597 - DNA, 18 bp, Artificial Sequence
  Detection oligonucleotide for GPIb beta
ggttaggtcgtagtattg

SEQ ID NO: 598 - DNA, 18 bp, Artificial Sequence
  Detection oligonucleotide for GPIb beta
ggttaggttgtagtattg

SEQ ID NO: 599 - DNA, 18 bp, Artificial Sequence
  Detection oligonucleotide for GPIb beta
atgggtttcggtgagttt

SEQ ID NO: 600 - DNA, 18 bp, Artificial Sequence
  Detection oligonucleotide for GPIb beta
atgggttttggtgagttt

SEQ ID NO: 601 - DNA, 18 bp, Artificial Sequence
  Detection oligonucleotide for GPIb beta
gggttttcggttgttttt

SEQ ID NO: 602 - DNA, 18 bp, Artificial Sequence
  Detection oligonucleotide for GPIb beta
gggtttttggttgttttt

SEQ ID NO: 603 - DNA, 18 bp, Artificial Sequence
  Detection oligonucleotide for MYOD1
atagtagtcgggtgttgg

SEQ ID NO: 604 - DNA, 18 bp, Artificial Sequence
  Detection oligonucleotide for MYOD1
atagtagttgggtgttgg

SEQ ID NO: 605 - DNA, 18 bp, Artificial Sequence
  Detection oligonucleotide for MYOD1
gtgttagtcgtttagggt

SEQ ID NO: 606 - DNA, 18 bp, Artificial Sequence
  Detection oligonucleotide for MYOD1
gtgttagttgtttagggt

SEQ ID NO: 607 - DNA, 18 bp, Artificial Sequence
  Detection oligonucleotide for MYOD1
tagttgttcgtttgggtt

SEQ ID NO: 608 - DNA, 18 bp, Artificial Sequence
  Detection oligonucleotide for MYOD1
tagttgtttgtttgggtt

SEQ ID NO: 609 - DNA, 18 bp, Artificial Sequence
  Detection oligonucleotide for MYOD1
ggttattacggataaata

SEQ ID NO: 610 - DNA, 18 bp, Artificial Sequence
  Detection oligonucleotide for MYOD1
ggttattatggataaata

SEQ ID NO: 611 - DNA, 18 bp, Artificial Sequence
  Detection oligonucleotide for MYOD1
aattaggtcggataggag

SEQ ID NO: 612 - DNA, 18 bp, Artificial Sequence
  Detection oligonucleotide for MYOD1
aattaggttggataggag

SEQ ID NO: 613 - DNA, 18 bp, Artificial Sequence
  Detection oligonucleotide for CDH3
aaattagtcgggtgtggt

SEQ ID NO: 614 - DNA, 18 bp, Artificial Sequence
  Detection oligonucleotide for CDH3
aaattagttgggtgtggt

SEQ ID NO: 615 - DNA, 18 bp, Artificial Sequence
  Detection oligonucleotide for CDH3
tgtggtggcgtaagtttg

SEQ ID NO: 616 - DNA, 18 bp, Artificial Sequence
  Detection oligonucleotide for CDH3
tgtggtggtgtaagtttg

SEQ ID NO: 617 - DNA, 18 bp, Artificial Sequence
  Detection oligonucleotide for CDH3
ggagttttcgtttttagt

SEQ ID NO: 618 - DNA, 18 bp, Artificial Sequence
  Detection oligonucleotide for CDH3
ggagtttttgtttttagt

SEQ ID NO: 619 - DNA, 18 bp, Artificial Sequence
  Detection oligonucleotide for CDH3
tagaattgcgagatagag

SEQ ID NO: 620 - DNA, 18 bp, Artificial Sequence
  Detection oligonucleotide for CDH3
tagaattgtgagatagag

SEQ ID NO: 621 - DNA, 18 bp, Artificial Sequence
  Detection oligonucleotide for WT1
tagtgagacgaggttttt

SEQ ID NO: 622 - DNA, 18 bp, Artificial Sequence
  Detection oligonucleotide for WT1
tagtgagatgaggttttt

SEQ ID NO: 623 - DNA, 18 bp, Artificial Sequence
  Detection oligonucleotide for WT1
tatattggcgaaggttaa

SEQ ID NO: 624 - DNA, 18 bp, Artificial Sequence
  Detection oligonucleotide for WT1
tatattggtgaaggttaa

SEQ ID NO: 625 - DNA, 18 bp, Artificial Sequence
  Detection oligonucleotide for WT1
tgttatatcggttagttg

SEQ ID NO: 626 - DNA, 18 bp, Artificial Sequence
  Detection oligonucleotide for WT1
tgttatattggttagttg

SEQ ID NO: 627 - DNA, 18 bp, Artificial Sequence
  Detection oligonucleotide for WT1
tgtttggtcgggtttggg

SEQ ID NO: 628 - DNA, 18 bp, Artificial Sequence
  Detection oligonucleotide for WT1
tgtttggttgggtttggg

SEQ ID NO: 629 - DNA, 18 bp, Artificial Sequence
  Detection oligonucleotide for WT1
tttagtttcgatttttgg

SEQ ID NO: 630 - DNA, 18 bp, Artificial Sequence
  Detection oligonucleotide for WT1
tttagttttgatttttgg

SEQ ID NO: 631 - DNA, 18 bp, Artificial Sequence
  Detection oligonucleotide for MYCL1
ttgagggtcgttaggtgg

SEQ ID NO: 632 - DNA, 18 bp, Artificial Sequence
  Detection oligonucleotide for MYCL1
ttgagggttgttaggtgg

SEQ ID NO: 633 - DNA, 18 bp, Artificial Sequence
  Detection oligonucleotide for MYCL1
ttttagttcggagtgggt

SEQ ID NO: 634 - DNA, 18 bp, Artificial Sequence
  Detection oligonucleotide for MYCL1
ttttagtttggagtgggt

SEQ ID NO: 635 - DNA, 18 bp, Artificial Sequence
  Detection oligonucleotide for MYCL1
agtttagtcggttggtat

SEQ ID NO: 636 - DNA, 18 bp, Artificial Sequence
  Detection oligonucleotide for MYCL1
agtttagttggttggtat

SEQ ID NO: 637 - DNA, 18 bp, Artificial Sequence
  Detection oligonucleotide for MYCL1
ggggttatcggggattga

SEQ ID NO: 638 - DNA, 18 bp, Artificial Sequence
  Detection oligonucleotide for MYCL1
ggggttattggggattga

SEQ ID NO: 639 - DNA, 18 bp, Artificial Sequence
  Detection oligonucleotide for ABL1
gtttgggtcgcgagagtt

SEQ ID NO: 640 - DNA, 18 bp, Artificial Sequence
  Detection oligonucleotide for ABL1
gtttgggttgtgagagtt

SEQ ID NO: 641 - DNA, 18 bp, Artificial Sequence
  Detection oligonucleotide for ABL1
ggatattgcgggtggttt

SEQ ID NO: 642 - DNA, 18 bp, Artificial Sequence
  Detection oligonucleotide for ABL1
ggatattgtgggtggttt

SEQ ID NO: 643 - DNA, 18 bp, Artificial Sequence
  Detection oligonucleotide for ABL1
tttggtttcgttgtggag

SEQ ID NO: 644 - DNA, 18 bp, Artificial Sequence
  Detection oligonucleotide for ABL1
tttggttttgttgtggag

SEQ ID NO: 645 - DNA, 18 bp, Artificial Sequence
  Detection oligonucleotide for ABL1
gggttttgcggttgagga

SEQ ID NO: 646 - DNA, 18 bp, Artificial Sequence
  Detection oligonucleotide for ABL1
gggttttgtggttgagga

SEQ ID NO: 647 - DNA, 18 bp, Artificial Sequence
  Detection oligonucleotide for ELK1
tttgttttcgttgagtag

SEQ ID NO: 648 - DNA, 18 bp, Artificial Sequence
  Detection oligonucleotide for ELK1
tttgtttttgttgagtag

SEQ ID NO: 649 - DNA, 18 bp, Artificial Sequence
  Detection oligonucleotide for ELK1
tttattttcgtttttggg

SEQ ID NO: 650 - DNA, 18 bp, Artificial Sequence
  Detection oligonucleotide for ELK1
tttatttttgtttttggg

SEQ ID NO: 651 - DNA, 18 bp, Artificial Sequence
  Detection oligonucleotide for ELK1
gaagggttcgttttttaa

SEQ ID NO: 652 - DNA, 18 bp, Artificial Sequence
  Detection oligonucleotide for ELK1
gaagggtttgttttttaa

SEQ ID NO: 653 - DNA, 18 bp, Artificial Sequence
  Detection oligonucleotide for APC
tattagagcgttttaaag

SEQ ID NO: 654 - DNA, 18 bp, Artificial Sequence
  Detection oligonucleotide for APC
tattagagtgttttaaag

SEQ ID NO: 655 - DNA, 18 bp, Artificial Sequence
  Detection oligonucleotide for APC
gtttttttcgatttgggt

SEQ ID NO: 656 - DNA, 18 bp, Artificial Sequence
  Detection oligonucleotide for APC
gttttttttgatttgggt

SEQ ID NO: 657 - DNA, 18 bp, Artificial Sequence
  Detection oligonucleotide for ARHI
tgttgttgcgtagtagaa

SEQ ID NO: 658 - DNA, 18 bp, Artificial Sequence
  Detection oligonucleotide for ARHI
tgttgttgtgtagtagaa

SEQ ID NO: 659 - DNA, 18 bp, Artificial Sequence
  Detection oligonucleotide for ARHI
gaattattcgtagttttg

SEQ ID NO: 660 - DNA, 18 bp, Artificial Sequence
  Detection oligonucleotide for ARHI
gaattatttgtagttttg

SEQ ID NO: 661 - DNA, 18 bp, Artificial Sequence
  Detection oligonucleotide for ARHI
gatagtttcgttgggaag

SEQ ID NO: 662 - DNA, 18 bp, Artificial Sequence
  Detection oligonucleotide for ARHI
gatagttttgttgggaag

SEQ ID NO: 663 - DNA, 18 bp, Artificial Sequence
  Detection oligonucleotide for ARHI
tagaagaacgaggtttga

SEQ ID NO: 664 - DNA, 18 bp, Artificial Sequence
  Detection oligonucleotide for ARHI
tagaagaatgaggtttga

SEQ ID NO: 665 - DNA, 18 bp, Artificial Sequence
  Detection oligonucleotide for ARHI
tatagttgcgtaggtagt

SEQ ID NO: 666 - DNA, 18 bp, Artificial Sequence
  Detection oligonucleotide for ARHI
tatagttgtgtaggtagt

SEQ ID NO: 667 - DNA, 18 bp, Artificial Sequence
  Detection oligonucleotide for BCL2
agaggtgtcgttggtttt

SEQ ID NO: 668 - DNA, 18 bp, Artificial Sequence
  Detection oligonucleotide for BCL2
agaggtgttgttggtttt

SEQ ID NO: 669 - DNA, 18 bp, Artificial Sequence
  Detection oligonucleotide for BCL2
taagttgtcgtagagggg

SEQ ID NO: 670 - DNA, 18 bp, Artificial Sequence
  Detection oligonucleotide for BCL2
taagttgttgtagagggg

SEQ ID NO: 671 - DNA, 18 bp, Artificial Sequence
  Detection oligonucleotide for BCL2
aggggttacgagtgggat

SEQ ID NO: 672 - DNA, 18 bp, Artificial Sequence
  Detection oligonucleotide for BCL2
aggggttatgagtgggat

SEQ ID NO: 673 - DNA, 18 bp, Artificial Sequence
  Detection oligonucleotide for BCL2
ttttgttacggtggtgga

SEQ ID NO: 674 - DNA, 18 bp, Artificial Sequence
  Detection oligonucleotide for BCL2
ttttgttatggtggtgga

SEQ ID NO: 675 - DNA, 18 bp, Artificial Sequence
  Detection oligonucleotide for CCND2
agttgggtcgggttagtt

SEQ ID NO: 676 - DNA, 18 bp, Artificial Sequence
  Detection oligonucleotide for CCND2
agttgggttgggttagtt

SEQ ID NO: 677 - DNA, 18 bp, Artificial Sequence
  Detection oligonucleotide for CCND2
tttaataacgagagggga

SEQ ID NO: 678 - DNA, 18 bp, Artificial Sequence
  Detection oligonucleotide for CCND2
tttaataatgagagggga

SEQ ID NO: 679 - DNA, 18 bp, Artificial Sequence
  Detection oligonucleotide for CCND2
ttagtttgcgttatcgtt

SEQ ID NO: 680 - DNA, 18 bp, Artificial Sequence
  Detection oligonucleotide for CCND2
ttagtttgtgttattgtt

SEQ ID NO: 681 - DNA, 18 bp, Artificial Sequence
  Detection oligonucleotide for CCND2
ttttagagcggagaagag

SEQ ID NO: 682 - DNA, 18 bp, Artificial Sequence
  Detection oligonucleotide for CCND2
ttttagagtggagaagag

SEQ ID NO: 683 - DNA, 18 bp, Artificial Sequence
  Detection oligonucleotide for CCND2
ggtagtttcgaggttttg

SEQ ID NO: 684 - DNA, 18 bp, Artificial Sequence
  Detection oligonucleotide for CCND2
ggtagttttgaggttttg

SEQ ID NO: 685 - DNA, 18 bp, Artificial Sequence
  Detection oligonucleotide for CDH1
agtttcgacgttattgag

SEQ ID NO: 686 - DNA, 18 bp, Artificial Sequence
  Detection oligonucleotide for CDH1
agttttgatgttattgag

SEQ ID NO: 687 - DNA, 18 bp, Artificial Sequence
  Detection oligonucleotide for CDH1
agaggttgcggttttaag

SEQ ID NO: 688 - DNA, 18 bp, Artificial Sequence
  Detection oligonucleotide for CDH1
agaggttgtggttttaag

SEQ ID NO: 689 - DNA, 18 bp, Artificial Sequence
  Detection oligonucleotide for CDH1
agtagcgtcgagaggttg

SEQ ID NO: 690 - DNA, 18 bp, Artificial Sequence
  Detection oligonucleotide for CDH1
agtagtgttgagaggttg

SEQ ID NO: 691 - DNA, 18 bp, Artificial Sequence
  Detection oligonucleotide for CDH1
aggggattcggggtattt

SEQ ID NO: 692 - DNA, 18 bp, Artificial Sequence
  Detection oligonucleotide for CDH1
aggggatttggggtattt

SEQ ID NO: 693 - DNA, 18 bp, Artificial Sequence
  Detection oligonucleotide for CDKN1A
aggtgtatcgtttttata

SEQ ID NO: 694 - DNA, 18 bp, Artificial Sequence
  Detection oligonucleotide for CDKN1A
aggtgtattgtttttata

SEQ ID NO: 695 - DNA, 18 bp, Artificial Sequence
  Detection oligonucleotide for CDKN1A
tgggttagcggtgagtta

SEQ ID NO: 696 - DNA, 18 bp, Artificial Sequence
  Detection oligonucleotide for CDKN1A
tgggttagtggtgagtta

SEQ ID NO: 697 - DNA, 18 bp, Artificial Sequence
  Detection oligonucleotide for CDKN1A
gtttatttcgtggggaaa

SEQ ID NO: 698 - DNA, 18 bp, Artificial Sequence
  Detection oligonucleotide for CDKN1A
gtttattttgtggggaaa

SEQ ID NO: 699 - DNA, 18 bp, Artificial Sequence
  Detection oligonucleotide for CDKN1A
ttggaattcggttaggtt

SEQ ID NO: 700 - DNA, 18 bp, Artificial Sequence
  Detection oligonucleotide for CDKN1A
ttggaatttggttaggtt

SEQ ID NO: 701 - DNA, 18 bp, Artificial Sequence
  Detection oligonucleotide for CDKN1B (p27 Kip1)
aagagaaacgttggaata

SEQ ID NO: 702 - DNA, 18 bp, Artificial Sequence
  Detection oligonucleotide for CDKN1B (p27 Kip1)
aagagaaatgttggaata

SEQ ID NO: 703 - DNA, 18 bp, Artificial Sequence
  Detection oligonucleotide for CDKN1B (p27 Kip1)
tttgatttcgaggggagt

SEQ ID NO: 704 - DNA, 18 bp, Artificial Sequence
  Detection oligonucleotide for CDKN1B (p27 Kip1)
tttgattttgaggggagt

SEQ ID NO: 705 - DNA, 18 bp, Artificial Sequence
  Detection oligonucleotide for CDKN1B (p27 Kip1)
gtatttggcggttggatt

SEQ ID NO: 706 - DNA, 18 bp, Artificial Sequence
  Detection oligonucleotide for CDKN1B (p27 Kip1)
gtatttggtggttggatt

SEQ ID NO: 707 - DNA, 18 bp, Artificial Sequence
  Detection oligonucleotide for CDKN1B (p27 Kip1)
tataatttcgggaaagaa

SEQ ID NO: 708 - DNA, 18 bp, Artificial Sequence
  Detection oligonucleotide for CDKN1B (p27 Kip1)
tataattttgggaaagaa

SEQ ID NO: 709 - DNA, 18 bp, Artificial Sequence
  Detection oligonucleotide for CDKN2a
agagtgaacgtatttaaa

SEQ ID NO: 710 - DNA, 18 bp, Artificial Sequence
  Detection oligonucleotide for CDKN2a
agagtgaatgtatttaaa

SEQ ID NO: 711 - DNA, 18 bp, Artificial Sequence
  Detection oligonucleotide for CDKN2a
gttatattcgttaagtgt

SEQ ID NO: 712 - DNA, 18 bp, Artificial Sequence
  Detection oligonucleotide for CDKN2a
gttatatttgttaagtgt

SEQ ID NO: 713 - DNA, 18 bp, Artificial Sequence
  Detection oligonucleotide for CDKN2a
taagtgttcggagttaat

SEQ ID NO: 714 - DNA, 18 bp, Artificial Sequence
  Detection oligonucleotide for CDKN2a
taagtgtttggagttaat

SEQ ID NO: 715 - DNA, 18 bp, Artificial Sequence
  Detection oligonucleotide for CDKN2a
gttagtatcggaggaaga

SEQ ID NO: 716 - DNA, 18 bp, Artificial Sequence
  Detection oligonucleotide for CDKN2a
gttagtattggaggaaga

SEQ ID NO: 717 - DNA, 18 bp, Artificial Sequence
  Detection oligonucleotide for CDKN2a
ggagttttcggttgattg

SEQ ID NO: 718 - DNA, 18 bp, Artificial Sequence
  Detection oligonucleotide for CDKN2a
ggagtttttggttgattg

SEQ ID NO: 719 - DNA, 18 bp, Artificial Sequence
  Detection oligonucleotide for CDKN2a
ttgtttaacgtatcgaat

SEQ ID NO: 720 - DNA, 18 bp, Artificial Sequence
  Detection oligonucleotide for CDKN2a
ttgtttaatgtattgaat

SEQ ID NO: 721 - DNA, 18 bp, Artificial Sequence
  Detection oligonucleotide for CDKN2a
aatagttacggtcggagg

SEQ ID NO: 722 - DNA, 18 bp, Artificial Sequence
  Detection oligonucleotide for CDKN2a
aatagttatggttggagg

SEQ ID NO: 723 - DNA, 18 bp, Artificial Sequence
  Detection oligonucleotide for CDKN2B
atatttagcgagtagtgt

SEQ ID NO: 724 - DNA, 18 bp, Artificial Sequence
  Detection oligonucleotide for CDKN2B
atatttagtgagtagtgt

SEQ ID NO: 725 - DNA, 18 bp, Artificial Sequence
  Detection oligonucleotide for CDKN2B
atagggggcggagtttaa

SEQ ID NO: 726 - DNA, 18 bp, Artificial Sequence
  Detection oligonucleotide for CDKN2B
atagggggtggagtttaa

SEQ ID NO: 727 - DNA, 18 bp, Artificial Sequence
  Detection oligonucleotide for CDKN2B
ttattgtacggggtttta

SEQ ID NO: 728 - DNA, 18 bp, Artificial Sequence
  Detection oligonucleotide for CDKN2B
ttattgtatggggtttta

SEQ ID NO: 729 - DNA, 18 bp, Artificial Sequence
  Detection oligonucleotide for CDKN2B
ttttaagtcgtagaagga

SEQ ID NO: 730 - DNA, 18 bp, Artificial Sequence
  Detection oligonucleotide for CDKN2B
ttttaagttgtagaagga

SEQ ID NO: 731 - DNA, 18 bp, Artificial Sequence
  Detection oligonucleotide for DAPK1
gttggagtcgaggtttga

SEQ ID NO: 732 - DNA, 18 bp, Artificial Sequence
  Detection oligonucleotide for DAPK1
gttggagttgaggtttga

SEQ ID NO: 733 - DNA, 18 bp, Artificial Sequence
  Detection oligonucleotide for DAPK1
gaagggagcgtattttat

SEQ ID NO: 734 - DNA, 18 bp, Artificial Sequence
  Detection oligonucleotide for DAPK1
gaagggagtgtattttat

SEQ ID NO: 735 - DNA, 18 bp, Artificial Sequence
  Detection oligonucleotide for DAPK1
ttgtttttcggaaatttg

SEQ ID NO: 736 - DNA, 18 bp, Artificial Sequence
  Detection oligonucleotide for DAPK1
ttgttttttggaaatttg

SEQ ID NO: 737 - DNA, 18 bp, Artificial Sequence
  Detection oligonucleotide for FOS
aatgttttcgtacgtagg

SEQ ID NO: 738 - DNA, 18 bp, Artificial Sequence
  Detection oligonucleotide for FOS
aatgtttttgtatgtagg

SEQ ID NO: 739 - DNA, 18 bp, Artificial Sequence
  Detection oligonucleotide for FOS
tatatggtcgagaaaaat

SEQ ID NO: 740 - DNA, 18 bp, Artificial Sequence
  Detection oligonucleotide for FOS
tatatggttgagaaaaat

SEQ ID NO: 741 - DNA, 18 bp, Artificial Sequence
  Detection oligonucleotide for FOS
tttagtatcgtaaagtag

SEQ ID NO: 742 - DNA, 18 bp, Artificial Sequence
  Detection oligonucleotide for FOS
tttagtattgtaaagtag

SEQ ID NO: 743 - DNA, 18 bp, Artificial Sequence
  Detection oligonucleotide for FOS
gtattgttcgagttcgag

SEQ ID NO: 744 - DNA, 18 bp, Artificial Sequence
  Detection oligonucleotide for FOS
gtattgtttgagtttgag

SEQ ID NO: 745 - DNA, 18 bp, Artificial Sequence
  Detection oligonucleotide for GSTP1
ggttttttcggttagttg

SEQ ID NO: 746 - DNA, 18 bp, Artificial Sequence
  Detection oligonucleotide for GSTP1
ggtttttttggttagttg

SEQ ID NO: 747 - DNA, 18 bp, Artificial Sequence
  Detection oligonucleotide for GSTP1
ttttagggcgtttttttg

SEQ ID NO: 748 - DNA, 18 bp, Artificial Sequence
  Detection oligonucleotide for GSTP1
ttttagggtgtttttttg

SEQ ID NO: 749 - DNA, 18 bp, Artificial Sequence
  Detection oligonucleotide for GSTP1
gtagttttcgttattagt

SEQ ID NO: 750 - DNA, 18 bp, Artificial Sequence
  Detection oligonucleotide for GSTP1
gtagtttttgttattagt

SEQ ID NO: 751 - DNA, 18 bp, Artificial Sequence
  Detection oligonucleotide for HIC-1
ttaaaacggcgtataggg

SEQ ID NO: 752 - DNA, 18 bp, Artificial Sequence
  Detection oligonucleotide for HIC-1
ttaaaatggtgtataggg

SEQ ID NO: 753 - DNA, 18 bp, Artificial Sequence
  Detection oligonucleotide for HIC-1
aggagattcgaaagttta

SEQ ID NO: 754 - DNA, 18 bp, Artificial Sequence
  Detection oligonucleotide for HIC-1
aggagatttgaaagttta

SEQ ID NO: 755 - DNA, 18 bp, Artificial Sequence
  Detection oligonucleotide for HIC-1
gggttttacgtggttgtt

SEQ ID NO: 756 - DNA, 18 bp, Artificial Sequence
  Detection oligonucleotide for HIC-1
gggttttatgtggttgtt

SEQ ID NO: 757 - DNA, 18 bp, Artificial Sequence
  Detection oligonucleotide for HIC-1
ttttagagcgttagggtt

SEQ ID NO: 758 - DNA, 18 bp, Artificial Sequence
  Detection oligonucleotide for HIC-1
ttttagagtgttagggtt

SEQ ID NO: 759 - DNA, 18 bp, Artificial Sequence
  Detection oligonucleotide for IGF2
agtttgaacgatgtaaga

SEQ ID NO: 760 - DNA, 18 bp, Artificial Sequence
  Detection oligonucleotide for IGF2
agtttgaatgatgtaaga

SEQ ID NO: 761 - DNA, 18 bp, Artificial Sequence
  Detection oligonucleotide for IGF2
ggttattacgataatttg

SEQ ID NO: 762 - DNA, 18 bp, Artificial Sequence
  Detection oligonucleotide for IGF2
ggttattatgataatttg

SEQ ID NO: 763 - DNA, 18 bp, Artificial Sequence
  Detection oligonucleotide for IGF2
ttgtatggtcgagtttat

SEQ ID NO: 764 - DNA, 18 bp, Artificial Sequence
  Detection oligonucleotide for IGF2
ttgtatggttgagtttat

SEQ ID NO: 765 - DNA, 18 bp, Artificial Sequence
  Detection oligonucleotide for IGF2
gattagggcgggaaatat

SEQ ID NO: 766 - DNA, 18 bp, Artificial Sequence
  Detection oligonucleotide for IGF2
gattagggtgggaaatat

SEQ ID NO: 767 - DNA, 18 bp, Artificial Sequence
  Detection oligonucleotide for IGF2
tggagtttacggaggttt

SEQ ID NO: 768 - DNA, 18 bp, Artificial Sequence
  Detection oligonucleotide for IGF2
tggagtttatggaggttt

SEQ ID NO: 769 - DNA, 18 bp, Artificial Sequence
  Detection oligonucleotide for MGMT
taaggatacgagttatat

SEQ ID NO: 770 - DNA, 18 bp, Artificial Sequence
  Detection oligonucleotide for MGMT
taaggatatgagttatat

SEQ ID NO: 771 - DNA, 18 bp, Artificial Sequence
  Detection oligonucleotide for MGMT
ttggagagcggttgagtt

SEQ ID NO: 772 - DNA, 18 bp, Artificial Sequence
  Detection oligonucleotide for MGMT
ttggagagtggttgagtt

SEQ ID NO: 773 - DNA, 18 bp, Artificial Sequence
  Detection oligonucleotide for MGMT
taggttatcggtgattgt

SEQ ID NO: 774 - DNA, 18 bp, Artificial Sequence
  Detection oligonucleotide for MGMT
taggttattggtgattgt

SEQ ID NO: 775 - DNA, 18 bp, Artificial Sequence
  Detection oligonucleotide for MGMT
taggggagcggttttagg

SEQ ID NO: 776 - DNA, 18 bp, Artificial Sequence
  Detection oligonucleotide for MGMT
taggggagtggttttagg

SEQ ID NO: 777 - DNA, 18 bp, Artificial Sequence
  Detection oligonucleotide for MGMT
agtaggatcgggattttt

SEQ ID NO: 778 - DNA, 18 bp, Artificial Sequence
  Detection oligonucleotide for MGMT
agtaggattgggattttt

SEQ ID NO: 779 - DNA, 18 bp, Artificial Sequence
  Detection oligonucleotide for MLH1
ttgagaagcgttaagtat

SEQ ID NO: 780 - DNA, 18 bp, Artificial Sequence
  Detection oligonucleotide for MLH1
ttgagaagtgttaagtat

SEQ ID NO: 781 - DNA, 18 bp, Artificial Sequence
  Detection oligonucleotide for MLH1
ttaggtagcgggtagtag

SEQ ID NO: 782 - DNA, 18 bp, Artificial Sequence
  Detection oligonucleotide for MLH1
ttaggtagtgggtagtag

SEQ ID NO: 783 - DNA, 18 bp, Artificial Sequence
  Detection oligonucleotide for MLH1
gtagtagtcgttttaggg

SEQ ID NO: 784 - DNA, 18 bp, Artificial Sequence
  Detection oligonucleotide for MLH1
gtagtagttgttttaggg

SEQ ID NO: 785 - DNA, 18 bp, Artificial Sequence
  Detection oligonucleotide for MLH1
atagttgtcgttgaaggg

SEQ ID NO: 786 - DNA, 18 bp, Artificial Sequence
  Detection oligonucleotide for MLH1
atagttgttgttgaaggg

SEQ ID NO: 787 - DNA, 18 bp, Artificial Sequence
  Detection oligonucleotide for MLH1
ttggatggcgtaagttat

SEQ ID NO: 788 - DNA, 18 bp, Artificial Sequence
  Detection oligonucleotide for MLH1
ttggatggtgtaagttat

SEQ ID NO: 789 - DNA, 18 bp, Artificial Sequence
  Detection oligonucleotide for MOS
agtagtttcgtaggtagt

SEQ ID NO: 790 - DNA, 18 bp, Artificial Sequence
  Detection oligonucleotide for MOS
agtagttttgtaggtagt

SEQ ID NO: 791 - DNA, 18 bp, Artificial Sequence
  Detection oligonucleotide for MOS
gtaagtcgttttgtatat

SEQ ID NO: 792 - DNA, 18 bp, Artificial Sequence
  Detection oligonucleotide for MOS
gtaagttgttttgtatat

SEQ ID NO: 793 - DNA, 18 bp, Artificial Sequence
  Detection oligonucleotide for MOS
atgttagtcggtttttgg

SEQ ID NO: 794 - DNA, 18 bp, Artificial Sequence
  Detection oligonucleotide for MOS
atgttagttggtttttgg

SEQ ID NO: 795 - DNA, 18 bp, Artificial Sequence
  Detection oligonucleotide for MPL
gtggtgggcgtttgtaat

SEQ ID NO: 796 - DNA, 18 bp, Artificial Sequence
  Detection oligonucleotide for MPL
gtggtgggtgtttgtaat

SEQ ID NO: 797 - DNA, 18 bp, Artificial Sequence
  Detection oligonucleotide for MPL
tttgaggtcgggagttta

SEQ ID NO: 798 - DNA, 18 bp, Artificial Sequence
  Detection oligonucleotide for MPL
tttgaggttgggagttta

SEQ ID NO: 799 - DNA, 18 bp, Artificial Sequence
  Detection oligonucleotide for MPL
ggtaatagagcgagattt

SEQ ID NO: 800 - DNA, 18 bp, Artificial Sequence
  Detection oligonucleotide for MPL
ggtaatagagtgagattt

SEQ ID NO: 801 - DNA, 18 bp, Artificial Sequence
  Detection oligonucleotide for MPL
ttaagtagcgggtaaggt

SEQ ID NO: 802 - DNA, 18 bp, Artificial Sequence
  Detection oligonucleotide for MPL
ttaagtagtgggtaaggt

SEQ ID NO: 803 - DNA, 18 bp, Artificial Sequence
  Detection oligonucleotide for MYC
ttagagtgttcggttgtt

SEQ ID NO: 804 - DNA, 18 bp, Artificial Sequence
  Detection oligonucleotide for MYC
ttagagtgtttggttgtt

SEQ ID NO: 805 - DNA, 18 bp, Artificial Sequence
  Detection oligonucleotide for MYC
ttataatgcgagggtttg

SEQ ID NO: 806 - DNA, 18 bp, Artificial Sequence
  Detection oligonucleotide for MYC
ttataatgtgagggtttg

SEQ ID NO: 807 - DNA, 18 bp, Artificial Sequence
  Detection oligonucleotide for MYC
aggattttcgagttgtgt

SEQ ID NO: 808 - DNA, 18 bp, Artificial Sequence
  Detection oligonucleotide for MYC
aggatttttgagttgtgt

SEQ ID NO: 809 - DNA, 18 bp, Artificial Sequence
  Detection oligonucleotide for MYC
aattttagcgagaggtag

SEQ ID NO: 810 - DNA, 18 bp, Artificial Sequence
  Detection oligonucleotide for MYC
aattttagtgagaggtag

SEQ ID NO: 811 - DNA, 18 bp, Artificial Sequence
  Detection oligonucleotide for MYC
ttgtgggcgttttgggaa

SEQ ID NO: 812 - DNA, 18 bp, Artificial Sequence
  Detection oligonucleotide for MYC
ttgtgggtgttttgggaa

SEQ ID NO: 813 - DNA, 18 bp, Artificial Sequence
  Detection oligonucleotide for PMS2
agattatacgttgtatgt

SEQ ID NO: 814 - DNA, 18 bp, Artificial Sequence
  Detection oligonucleotide for PMS2
agattatatgttgtatgt

SEQ ID NO: 815 - DNA, 18 bp, Artificial Sequence
  Detection oligonucleotide for PMS2
taggagttcgagattagt

SEQ ID NO: 816 - DNA, 18 bp, Artificial Sequence
  Detection oligonucleotide for PMS2
taggagtttgagattagt

SEQ ID NO: 817 - DNA, 18 bp, Artificial Sequence
  Detection oligonucleotide for PMS2
aaattagtcgggtttagt

SEQ ID NO: 818 - DNA, 18 bp, Artificial Sequence
  Detection oligonucleotide for PMS2
aaattagttgggtttagt

SEQ ID NO: 819 - DNA, 18 bp, Artificial Sequence
  Detection oligonucleotide for PMS2
gtggatagcgtttgtaat

SEQ ID NO: 820 - DNA, 18 bp, Artificial Sequence
  Detection oligonucleotide for PMS2
gtggatagtgtttgtaat

SEQ ID NO: 821 - DNA, 18 bp, Artificial Sequence
  Detection oligonucleotide for PTEN
ggattttgcgttcgtatt

SEQ ID NO: 822 - DNA, 18 bp, Artificial Sequence
  Detection oligonucleotide for PTEN
ggattttgtgtttgtatt

SEQ ID NO: 823 - DNA, 18 bp, Artificial Sequence
  Detection oligonucleotide for PTEN
agagttatcgttttgttt

SEQ ID NO: 824 - DNA, 18 bp, Artificial Sequence
  Detection oligonucleotide for PTEN
agagttattgttttgttt

SEQ ID NO: 825 - DNA, 18 bp, Artificial Sequence
  Detection oligonucleotide for PTEN
tgatgtggcgggattttt

SEQ ID NO: 826 - DNA, 18 bp, Artificial Sequence
  Detection oligonucleotide for PTEN
tgatgtggtgggattttt

SEQ ID NO: 827 - DNA, 18 bp, Artificial Sequence
  Detection oligonucleotide for RBL2
attagtgtcgttgttaag

SEQ ID NO: 828 - DNA, 18 bp, Artificial Sequence
  Detection oligonucleotide for RBL2
attagtgttgttgttaag

SEQ ID NO: 829 - DNA, 18 bp, Artificial Sequence
  Detection oligonucleotide for RBL2
agattatacggataaggg

SEQ ID NO: 830 - DNA, 18 bp, Artificial Sequence
  Detection oligonucleotide for RBL2
agattatatggataaggg

SEQ ID NO: 831 - DNA, 18 bp, Artificial Sequence
  Detection oligonucleotide for SFN
atagagttcggtattggt

SEQ ID NO: 832 - DNA, 18 bp, Artificial Sequence
  Detection oligonucleotide for SFN
atagagtttggtattggt

SEQ ID NO: 833 - DNA, 18 bp, Artificial Sequence
  Detection oligonucleotide for SFN
gagtaggtcgaacgttat

SEQ ID NO: 834 - DNA, 18 bp, Artificial Sequence
  Detection oligonucleotide for SFN
gagtaggttgaatgttat

SEQ ID NO: 835 - DNA, 18 bp, Artificial Sequence
  Detection oligonucleotide for SFN
aaaagtaacgaggagggt

SEQ ID NO: 836 - DNA, 18 bp, Artificial Sequence
  Detection oligonucleotide for SFN
aaaagtaatgaggagggt

SEQ ID NO: 837 - DNA, 18 bp, Artificial Sequence
  Detection oligonucleotide for TGFBR2
atttggagcgaggaattt

SEQ ID NO: 838 - DNA, 18 bp, Artificial Sequence
  Detection oligonucleotide for TGFBR2
atttggagtgaggaattt

SEQ ID NO: 839 - DNA, 18 bp, Artificial Sequence
  Detection oligonucleotide for TGFBR2
ttgaaagtcggttaaagt

SEQ ID NO: 840 - DNA, 18 bp, Artificial Sequence
  Detection oligonucleotide for TGFBR2
ttgaaagttggttaaagt

SEQ ID NO: 841 - DNA, 18 bp, Artificial Sequence
  Detection oligonucleotide for TGFBR2
aaagttttcggaggggtt

SEQ ID NO: 842 - DNA, 18 bp, Artificial Sequence
  Detection oligonucleotide for TGFBR2
aaagtttttggaggggtt

SEQ ID NO: 843 - DNA, 18 bp, Artificial Sequence
  Detection oligonucleotide for TGFBR2
ggtagttacgagagagtt

SEQ ID NO: 844 - DNA, 18 bp, Artificial Sequence
  Detection oligonucleotide for TGFBR2
ggtagttatgagagagtt

SEQ ID NO: 845 - DNA, 18 bp, Artificial Sequence
  Detection oligonucleotide for TP73
tgatttagcgtaggtttg

SEQ ID NO: 846 - DNA, 18 bp, Artificial Sequence
  Detection oligonucleotide for TP73
tgatttagtgtaggtttg

SEQ ID NO: 847 - DNA, 18 bp, Artificial Sequence
  Detection oligonucleotide for TP73
ttagagttcgagtttata

SEQ ID NO: 848 - DNA, 18 bp, Artificial Sequence
  Detection oligonucleotide for TP73
ttagagtttgagtttata

SEQ ID NO: 849 - DNA, 18 bp, Artificial Sequence
  Detection oligonucleotide for TP73
gagtgttcgcgttttggg

SEQ ID NO: 850 - DNA, 18 bp, Artificial Sequence
  Detection oligonucleotide for TP73
gagtgtttgtgttttggg

SEQ ID NO: 851 - DNA, 18 bp, Artificial Sequence
  Detection oligonucleotide for TP73
aagatgtgcgagttagtc

SEQ ID NO: 852 - DNA, 18 bp, Artificial Sequence
  Detection oligonucleotide for TP73
aagatgtgtgagttagtc

SEQ ID NO: 853 - DNA, 18 bp, Artificial Sequence
  Detection oligonucleotide for TP73
aagttacgggttttattg

SEQ ID NO: 854 - DNA, 18 bp, Artificial Sequence
  Detection oligonucleotide for TP73
aagttatgggttttattg

SEQ ID NO: 855 - DNA, 18 bp, Artificial Sequence
  Detection oligonucleotide for TP73
ttagattacgggttttat

SEQ ID NO: 856 - DNA, 18 bp, Artificial Sequence
  Detection oligonucleotide for TP73
ttagattatgggttttat

SEQ ID NO: 857 - DNA, 18 bp, Artificial Sequence
  Detection oligonucleotide for TP73
taagtagcgtcgttattg

SEQ ID NO: 858 - DNA, 18 bp, Artificial Sequence
  Detection oligonucleotide for TP73
taagtagtgttgttattg

SEQ ID NO: 859 - DNA, 18 bp, Artificial Sequence
  Detection oligonucleotide for TP73
ggaagtttcgatggttta

SEQ ID NO: 860 - DNA, 18 bp, Artificial Sequence
  Detection oligonucleotide for TP73
ggaagttttgatggttta

SEQ ID NO: 861 - DNA, 18 bp, Artificial Sequence
  Detection oligonucleotide for CDKN1C
atgaagaacggttaaggg

SEQ ID NO: 862 - DNA, 18 bp, Artificial Sequence
  Detection oligonucleotide for CDKN1C
atgaagaatggttaaggg

SEQ ID NO: 863 - DNA, 18 bp, Artificial Sequence
  Detection oligonucleotide for CDKN1C
ttaagttacggttattag

SEQ ID NO: 864 - DNA, 18 bp, Artificial Sequence
  Detection oligonucleotide for CDKN1C
ttaagttatggttattag

SEQ ID NO: 865 - DNA, 18 bp, Artificial Sequence
  Detection oligonucleotide for CDKN1C
ttagtgttcgtttggaat

SEQ ID NO: 866 - DNA, 18 bp, Artificial Sequence
  Detection oligonucleotide for CDKN1C
ttagtgtttgtttggaat

SEQ ID NO: 867 - DNA, 18 bp, Artificial Sequence
  Detection oligonucleotide for CDKN1C
aggagttgcggtgggaat

SEQ ID NO: 868 - DNA, 18 bp, Artificial Sequence
  Detection oligonucleotide for CDKN1C
aggagttgtggtgggaat

SEQ ID NO: 869 - DNA, 18 bp, Artificial Sequence
  Detection oligonucleotide for GSK3
gggtaaagcgcggatatt

SEQ ID NO: 870 - DNA, 18 bp, Artificial Sequence
  Detection oligonucleotide for GSK3
gggtaaagtgtggatatt

SEQ ID NO: 871 - DNA, 18 bp, Artificial Sequence
  Detection oligonucleotide for GSK3
tatgttttcggcgaatgg

SEQ ID NO: 872 - DNA, 18 bp, Artificial Sequence
  Detection oligonucleotide for GSK3
tatgtttttggtgaatgg

SEQ ID NO: 873 - DNA, 18 bp, Artificial Sequence
  Detection oligonucleotide for GSK3
ggggaatagtcgaggagt

SEQ ID NO: 874 - DNA, 18 bp, Artificial Sequence
  Detection oligonucleotide for GSK3
ggggaatagttgaggagt

SEQ ID NO: 875 - DNA, 18 bp, Artificial Sequence
  Detection oligonucleotide for GSK3
aggagtcgttgtttgggg

SEQ ID NO: 876 - DNA, 18 bp, Artificial Sequence
  Detection oligonucleotide for GSK3
aggagttgttgtttgggg

SEQ ID NO: 877 - DNA, 18 bp, Artificial Sequence
  Detection oligonucleotide for CDC2
tagttattcgggaaggta

SEQ ID NO: 878 - DNA, 18 bp, Artificial Sequence
  Detection oligonucleotide for CDC2
tagttatttgggaaggta

SEQ ID NO: 879 - DNA, 18 bp, Artificial Sequence
  Detection oligonucleotide for CDC2
aggtattgcggtagttgg

SEQ ID NO: 880 - DNA, 18 bp, Artificial Sequence
  Detection oligonucleotide for CDC2
aggtattgtggtagttgg

SEQ ID NO: 881 - DNA, 18 bp, Artificial Sequence
  Detection oligonucleotide for CDC2
gggttattcgattggtga

SEQ ID NO: 882 - DNA, 18 bp, Artificial Sequence
  Detection oligonucleotide for CDC2
gggttatttgattggtga

SEQ ID NO: 883 - DNA, 18 bp, Artificial Sequence
  Detection oligonucleotide for CDC2
aaattgttcgtatttggt

SEQ ID NO: 884 - DNA, 18 bp, Artificial Sequence
  Detection oligonucleotide for CDC2
aaattgtttgtatttggt

SEQ ID NO: 885 - DNA, 18 bp, Artificial Sequence
  Detection oligonucleotide for ESR1
agatatatcggagtttgg

SEQ ID NO: 886 - DNA, 18 bp, Artificial Sequence
  Detection oligonucleotide for ESR1
agatatattggagtttgg

SEQ ID NO: 887 - DNA, 18 bp, Artificial Sequence
  Detection oligonucleotide for ESR1
gtttggtacggggtatat

SEQ ID NO: 888 - DNA, 18 bp, Artificial Sequence
  Detection oligonucleotide for ESR1
gtttggtatggggtatat

SEQ ID NO: 889 - DNA, 18 bp, Artificial Sequence
  Detection oligonucleotide for ESR1
ttttaaatcgagttgtgt

SEQ ID NO: 890 - DNA, 18 bp, Artificial Sequence
  Detection oligonucleotide for ESR1
ttttaaattgagttgtgt

SEQ ID NO: 891 - DNA, 18 bp, Artificial Sequence
  Detection oligonucleotide for ESR1
tatgagttcgggagatta

SEQ ID NO: 892 - DNA, 18 bp, Artificial Sequence
  Detection oligonucleotide for ESR1
tatgagtttgggagatta

SEQ ID NO: 893 - DNA, 18 bp, Artificial Sequence
  Detection oligonucleotide for ESR1
tggaggttcgggagttta

SEQ ID NO: 894 - DNA, 18 bp, Artificial Sequence
  Detection oligonucleotide for ESR1
tggaggtttgggagttta

SEQ ID NO: 895 - DNA, 18 bp, Artificial Sequence
  Detection oligonucleotide for APAF1
tttggtatcgtttagagt

SEQ ID NO: 896 - DNA, 18 bp, Artificial Sequence
  Detection oligonucleotide for APAF1
tttggtattgtttagagt

SEQ ID NO: 897 - DNA, 18 bp, Artificial Sequence
  Detection oligonucleotide for APAF1
gtatgagtcgtggtagga

SEQ ID NO: 898 - DNA, 18 bp, Artificial Sequence
  Detection oligonucleotide for APAF1
gtatgagttgtggtagga

SEQ ID NO: 899 - DNA, 18 bp, Artificial Sequence
  Detection oligonucleotide for APAF1
gtggattcggcgggattt

SEQ ID NO: 900 - DNA, 18 bp, Artificial Sequence
  Detection oligonucleotide for APAF1
gtggatttggtgggattt

SEQ ID NO: 901 - DNA, 18 bp, Artificial Sequence
  Detection oligonucleotide for APAF1
tttagaggcggagaagaa

SEQ ID NO: 902 - DNA, 18 bp, Artificial Sequence
  Detection oligonucleotide for APAF1
tttagaggtggagaagaa

SEQ ID NO: 903 - DNA, 18 bp, Artificial Sequence
  Detection oligonucleotide for APAF1
gaagaggtagcgagtgga

SEQ ID NO: 904 - DNA, 18 bp, Artificial Sequence
  Detection oligonucleotide for APAF1
gaagaggtagtgagtgga

SEQ ID NO: 905 - DNA, 18 bp, Artificial Sequence
  Detection oligonucleotide for BAK1
taggttgtcggtttgtgc

SEQ ID NO: 906 - DNA, 18 bp, Artificial Sequence
  Detection oligonucleotide for BAK1
taggttgttggtttgtgc

SEQ ID NO: 907 - DNA, 18 bp, Artificial Sequence
  Detection oligonucleotide for BAK1
tttgtattcggtggttat

SEQ ID NO: 908 - DNA, 18 bp, Artificial Sequence
  Detection oligonucleotide for BAK1
tttgtatttggtggttat

SEQ ID NO: 909 - DNA, 18 bp, Artificial Sequence
  Detection oligonucleotide for BAK1
ggagtttcgcgggttttt

SEQ ID NO: 910 - DNA, 18 bp, Artificial Sequence
  Detection oligonucleotide for BAK1
ggagttttgtgggttttt

SEQ ID NO: 911 - DNA, 18 bp, Artificial Sequence
  Detection oligonucleotide for BAK1
taggatttcggtaggtaa

SEQ ID NO: 912 - DNA, 18 bp, Artificial Sequence
  Detection oligonucleotide for BAK1
taggattttggtaggtaa

SEQ ID NO: 913 - DNA, 18 bp, Artificial Sequence
  Detection oligonucleotide for BAX
agtttgggcgtgggttat

SEQ ID NO: 914 - DNA, 18 bp, Artificial Sequence
  Detection oligonucleotide for BAX
agtttgggtgtgggttat

SEQ ID NO: 915 - DNA, 18 bp, Artificial Sequence
  Detection oligonucleotide for BAX
attagagttgcgattgga

SEQ ID NO: 916 - DNA, 18 bp, Artificial Sequence
  Detection oligonucleotide for BAX
attagagttgtgattgga

SEQ ID NO: 917 - DNA, 18 bp, Artificial Sequence
  Detection oligonucleotide for BAX
gtatttatcgggagatgt

SEQ ID NO: 918 - DNA, 18 bp, Artificial Sequence
  Detection oligonucleotide for BAX
gtatttattgggagatgt

SEQ ID NO: 919 - DNA, 18 bp, Artificial Sequence
  Detection oligonucleotide for BAX
tttagaggcgggggtgag

SEQ ID NO: 920 - DNA, 18 bp, Artificial Sequence
  Detection oligonucleotide for BAX
tttagaggtgggggtgag

SEQ ID NO: 921 - DNA, 18 bp, Artificial Sequence
  Detection oligonucleotide for CASP10
gaagtaaacggtttttag

SEQ ID NO: 922 - DNA, 18 bp, Artificial Sequence
  Detection oligonucleotide for CASP10
gaagtaaatggtttttag

SEQ ID NO: 923 - DNA, 18 bp, Artificial Sequence
  Detection oligonucleotide for CASP10
ttataatacgaagttatg

SEQ ID NO: 924 - DNA, 18 bp, Artificial Sequence
  Detection oligonucleotide for CASP10
ttataatatgaagttatg

SEQ ID NO: 925 - DNA, 18 bp, Artificial Sequence
  Detection oligonucleotide for CASP10
gaggttttcggatttttt

SEQ ID NO: 926 - DNA, 18 bp, Artificial Sequence
  Detection oligonucleotide for CASP10
gaggtttttggatttttt

SEQ ID NO: 927 - DNA, 18 bp, Artificial Sequence
  Detection oligonucleotide for CASP10
ttttgtttcggtaaaagg

SEQ ID NO: 928 - DNA, 18 bp, Artificial Sequence
  Detection oligonucleotide for CASP10
ttttgttttggtaaaagg

SEQ ID NO: 929 - DNA, 18 bp, Artificial Sequence
  Detection oligonucleotide for CASP8
gaatgagtcgaggaaggt

SEQ ID NO: 930 - DNA, 18 bp, Artificial Sequence
  Detection oligonucleotide for CASP8
gaatgagttgaggaaggt

SEQ ID NO: 931 - DNA, 18 bp, Artificial Sequence
  Detection oligonucleotide for CASP8
tattgagacgttaagtaa

SEQ ID NO: 932 - DNA, 18 bp, Artificial Sequence
  Detection oligonucleotide for CASP8
tattgagatgttaagtaa

SEQ ID NO: 933 - DNA, 18 bp, Artificial Sequence
  Detection oligonucleotide for CASP8
taaggttacgtagttagt

SEQ ID NO: 934 - DNA, 18 bp, Artificial Sequence
  Detection oligonucleotide for CASP8
taaggttatgtagttagt

SEQ ID NO: 935 - DNA, 18 bp, Artificial Sequence
  Detection oligonucleotide for CASP8
gttaatagcggggatttt

SEQ ID NO: 936 - DNA, 18 bp, Artificial Sequence
  Detection oligonucleotide for CASP8
gttaatagtggggatttt

SEQ ID NO: 937 - DNA, 18 bp, Artificial Sequence
  Detection oligonucleotide for CASP9
tatatgatcgaggatatt

SEQ ID NO: 938 - DNA, 18 bp, Artificial Sequence
  Detection oligonucleotide for CASP9
tatatgattgaggatatt

SEQ ID NO: 939 - DNA, 18 bp, Artificial Sequence
  Detection oligonucleotide for CASP9
attttttagtcgggtgtt

SEQ ID NO: 940 - DNA, 18 bp, Artificial Sequence
  Detection oligonucleotide for CASP9
attttttagttgggtgtt

SEQ ID NO: 941 - DNA, 18 bp, Artificial Sequence
  Detection oligonucleotide for CASP9
ttagttagcgtatattgt

SEQ ID NO: 942 - DNA, 18 bp, Artificial Sequence
  Detection oligonucleotide for CASP9
ttagttagtgtatattgt

SEQ ID NO: 943 - DNA, 18 bp, Artificial Sequence
  Detection oligonucleotide for CASP9
tgataaaacgttagaggt

SEQ ID NO: 944 - DNA, 18 bp, Artificial Sequence
  Detection oligonucleotide for CASP9
tgataaaatgttagaggt

SEQ ID NO: 945 - DNA, 18 bp, Artificial Sequence
  Detection oligonucleotide for TCL1A
ttagagtacgttttttgg

SEQ ID NO: 946 - DNA, 18 bp, Artificial Sequence
  Detection oligonucleotide for TCL1A
ttagagtatgttttttgg

SEQ ID NO: 947 - DNA, 18 bp, Artificial Sequence
  Detection oligonucleotide for TCL1A
tttatagtcgatattagg

SEQ ID NO: 948 - DNA, 18 bp, Artificial Sequence
  Detection oligonucleotide for TCL1A
tttatagttgatattagg

SEQ ID NO: 949 - DNA, 18 bp, Artificial Sequence
  Detection oligonucleotide for TCL1A
tagattcggttttagttg

SEQ ID NO: 950 - DNA, 18 bp, Artificial Sequence
  Detection oligonucleotide for TCL1A
tagatttggttttagttg

SEQ ID NO: 951 - DNA, 18 bp, Artificial Sequence
  Detection oligonucleotide for TCL1A
ttttggaacggtggtagt

SEQ ID NO: 952 - DNA, 18 bp, Artificial Sequence
  Detection oligonucleotide for TCL1A
ttttggaatggtggtagt

SEQ ID NO: 953 - DNA, 18 bp, Artificial Sequence
  Detection oligonucleotide for PML
ttaagagtcgtagatgta

SEQ ID NO: 954 - DNA, 18 bp, Artificial Sequence
  Detection oligonucleotide for PML
ttaagagttgtagatgta

SEQ ID NO: 955 - DNA, 18 bp, Artificial Sequence
  Detection oligonucleotide for PML
gagttgggcgtataaaga

SEQ ID NO: 956 - DNA, 18 bp, Artificial Sequence
  Detection oligonucleotide for PML
gagttgggtgtataaaga

SEQ ID NO: 957 - DNA, 18 bp, Artificial Sequence
  Detection oligonucleotide for PML
gtaaagcgggagaggtag

SEQ ID NO: 958 - DNA, 18 bp, Artificial Sequence
  Detection oligonucleotide for PML
gtaaagtgggagaggtag

SEQ ID NO: 959 - DNA, 18 bp, Artificial Sequence
  Detection oligonucleotide for PML
ttaaagatacgtttagag

SEQ ID NO: 960 - DNA, 18 bp, Artificial Sequence
  Detection oligonucleotide for PML
ttaaagatatgtttagag

SEQ ID NO: 961 - DNA, 18 bp, Artificial Sequence
  Detection oligonucleotide for HOXA5
agttagtcgggttttaag

SEQ ID NO: 962 - DNA, 18 bp, Artificial Sequence
  Detection oligonucleotide for HOXA5
agttagttgggttttaag

SEQ ID NO: 963 - DNA, 18 bp, Artificial Sequence
  Detection oligonucleotide for HOXA5
ttatagggttcggttttt

SEQ ID NO: 964 - DNA, 18 bp, Artificial Sequence
  Detection oligonucleotide for HOXA5
ttatagggtttggttttt

SEQ ID NO: 965 - DNA, 18 bp, Artificial Sequence
  Detection oligonucleotide for HOXA5
ttttaaggcgaggttaaa

SEQ ID NO: 966 - DNA, 18 bp, Artificial Sequence
  Detection oligonucleotide for HOXA5
ttttaaggtgaggttaaa

SEQ ID NO: 967 - DNA, 18 bp, Artificial Sequence
  Detection oligonucleotide for HOXA5
atgataggcgtttattaa

SEQ ID NO: 968 - DNA, 18 bp, Artificial Sequence
  Detection oligonucleotide for HOXA5
atgataggtgtttattaa

SEQ ID NO: 969 - DNA, 18 bp, Artificial Sequence
  Detection oligonucleotide for SDC4
ggttatacgatttttgtg

SEQ ID NO: 970 - DNA, 18 bp, Artificial Sequence
  Detection oligonucleotide for SDC4
ggttatatgatttttgtg

SEQ ID NO: 971 - DNA, 18 bp, Artificial Sequence
  Detection oligonucleotide for SDC4
taggttttgcgggttata

SEQ ID NO: 972 - DNA, 18 bp, Artificial Sequence
  Detection oligonucleotide for SDC4
taggttttgtgggttata

SEQ ID NO: 973 - DNA, 18 bp, Artificial Sequence
  Detection oligonucleotide for SDC4
atgtgaatcgtgttaaga

SEQ ID NO: 974 - DNA, 18 bp, Artificial Sequence
  Detection oligonucleotide for SDC4
atgtgaattgtgttaaga

SEQ ID NO: 975 - DNA, 18 bp, Artificial Sequence
  Detection oligonucleotide for PITX2
ttaagagacggaataaag

SEQ ID NO: 976 - DNA, 18 bp, Artificial Sequence
  Detection oligonucleotide for PITX2
ttaagagatggaataaag

SEQ ID NO: 977 - DNA, 18 bp, Artificial Sequence
  Detection oligonucleotide for PITX2
aattaggacgggttggga

SEQ ID NO: 978 - DNA, 18 bp, Artificial Sequence
  Detection oligonucleotide for PITX2
aattaggatgggttggga

SEQ ID NO: 979 - DNA, 18 bp, Artificial Sequence
  Detection oligonucleotide for PITX2
taggagtacggattttta

SEQ ID NO: 980 - DNA, 18 bp, Artificial Sequence
  Detection oligonucleotide for PITX2
taggagtatggattttta

SEQ ID NO: 981 - DNA, 18 bp, Artificial Sequence
  Detection oligonucleotide for PITX2
gagttaatcgaggagtag

SEQ ID NO: 982 - DNA, 18 bp, Artificial Sequence
  Detection oligonucleotide for PITX2
gagttaattgaggagtag

SEQ ID NO: 983 - DNA, 18 bp, Artificial Sequence
  Detection oligonucleotide for PITX2
ggatttggcggggtattt

SEQ ID NO: 984 - DNA, 18 bp, Artificial Sequence
  Detection oligonucleotide for PITX2
ggatttggtggggtattt

SEQ ID NO: 985 - DNA, 18 bp, Artificial Sequence
  Detection oligonucleotide for GPR37
agtttagacgaagtttta

SEQ ID NO: 986 - DNA, 18 bp, Artificial Sequence
  Detection oligonucleotide for GPR37
agtttagatgaagtttta

SEQ ID NO: 987 - DNA, 18 bp, Artificial Sequence
  Detection oligonucleotide for GPR37
gttattttcggtggttga

SEQ ID NO: 988 - DNA, 18 bp, Artificial Sequence
  Detection oligonucleotide for GPR37
gttatttttggtggttga

SEQ ID NO: 989 - DNA, 18 bp, Artificial Sequence
  Detection oligonucleotide for GPR37
agggtgatagcggaagat

SEQ ID NO: 990 - DNA, 18 bp, Artificial Sequence
  Detection oligonucleotide for GPR37
agggtgatagtggaagat

SEQ ID NO: 991 - DNA, 18 bp, Artificial Sequence
  Detection oligonucleotide for GPR37
gttaggatcgatatttgt

SEQ ID NO: 992 - DNA, 18 bp, Artificial Sequence
  Detection oligonucleotide for GPR37
gttaggattgatatttgt

SEQ ID NO: 993 - DNA, 18 bp, Artificial Sequence
  Detection oligonucleotide for PRAME
gggattgtcgtataaaat

SEQ ID NO: 994 - DNA, 18 bp, Artificial Sequence
  Detection oligonucleotide for PRAME
gggattgttgtataaaat

SEQ ID NO: 995 - DNA, 18 bp, Artificial Sequence
  Detection oligonucleotide for PRAME
tttagattcgatttggga

SEQ ID NO: 996 - DNA, 18 bp, Artificial Sequence
  Detection oligonucleotide for PRAME
tttagatttgatttggga

SEQ ID NO: 997 - DNA, 18 bp, Artificial Sequence
  Detection oligonucleotide for PRAME
tagagttgcgggttttta

SEQ ID NO: 998 - DNA, 18 bp, Artificial Sequence
  Detection oligonucleotide for PRAME
tagagttgtgggttttta

SEQ ID NO: 999 - DNA, 18 bp, Artificial Sequence
  Detection oligonucleotide for PRAME
aataggtcgcgtggtgag

SEQ ID NO: 1000 - DNA, 18 bp, Artificial Sequence
  Detection oligonucleotide for PRAME
aataggttgtgtggtgag

SEQ ID NO: 1001 - DNA, 18 bp, Artificial Sequence
  Detection oligonucleotide for N-MYC
agttttggcgtttttttt

SEQ ID NO: 1002 - DNA, 18 bp, Artificial Sequence
  Detection oligonucleotide for N-MYC
agttttggtgtttttttt

SEQ ID NO: 1003 - DNA, 18 bp, Artificial Sequence
  Detection oligonucleotide for N-MYC
ggtaaagtcgtttttttt

SEQ ID NO: 1004 - DNA, 18 bp, Artificial Sequence
  Detection oligonucleotide for N-MYC
ggtaaagttgtttttttt

SEQ ID NO: 1005 - DNA, 18 bp, Artificial Sequence
  Detection oligonucleotide for N-MYC
tttgtttgcgttatagtt

SEQ ID NO: 1006 - DNA, 18 bp, Artificial Sequence
  Detection oligonucleotide for N-MYC
tttgtttgtgttatagtt

SEQ ID NO: 1007 - DNA, 18 bp, Artificial Sequence
  Detection oligonucleotide for N-MYC
atatttttcgagttttaa

SEQ ID NO: 1008 - DNA, 18 bp, Artificial Sequence
  Detection oligonucleotide for N-MYC
atattttttgagttttaa

SEQ ID NO: 1009 - DNA, 18 bp, Artificial Sequence
  Detection oligonucleotide for N-MYC
ttttaaagcgtaggttgt

SEQ ID NO: 1010 - DNA, 18 bp, Artificial Sequence
  Detection oligonucleotide for N-MYC
ttttaaagtgtaggttgt

SEQ ID NO: 1011 - DNA, 18 bp, Artificial Sequence
  Detection oligonucleotide for N-MYC
ggtggatgcggggggttt

SEQ ID NO: 1012 - DNA, 18 bp, Artificial Sequence
  Detection oligonucleotide for N-MYC
ggtggatgtggggggttt

SEQ ID NO: 1013 - DNA, 18 bp, Artificial Sequence
  Detection oligonucleotide for L-MYC
gggtggggcggggagtag

SEQ ID NO: 1014 - DNA, 18 bp, Artificial Sequence
  Detection oligonucleotide for L-MYC
gggtggggtggggagtag

SEQ ID NO: 1015 - DNA, 18 bp, Artificial Sequence
  Detection oligonucleotide for L-MYC
ttttagttcggagtgggt

SEQ ID NO: 1016 - DNA, 18 bp, Artificial Sequence
  Detection oligonucleotide for L-MYC
ttttagtttggagtgggt

SEQ ID NO: 1017 - DNA, 18 bp, Artificial Sequence
  Detection oligonucleotide for L-MYC
aaggagtacggtttagtt

SEQ ID NO: 1018 - DNA, 18 bp, Artificial Sequence
  Detection oligonucleotide for L-MYC
aaggagtatggtttagtt

SEQ ID NO: 1019 - DNA, 18 bp, Artificial Sequence
  Detection oligonucleotide for L-MYC
agtttagtcggttggtat

SEQ ID NO: 1020 - DNA, 18 bp, Artificial Sequence
  Detection oligonucleotide for L-MYC
agtttagttggttggtat

SEQ ID NO: 1021 - DNA, 18 bp, Artificial Sequence
  Detection oligonucleotide for L-MYC
tttgtttgcgttttttag

SEQ ID NO: 1022 - DNA, 18 bp, Artificial Sequence
  Detection oligonucleotide for L-MYC
tttgtttgtgttttttag

SEQ ID NO: 1023 - DNA, 18 bp, Artificial Sequence
  Detection oligonucleotide for L-MYC
ttttttagcgtgtaattt

SEQ ID NO: 1024 - DNA, 18 bp, Artificial Sequence
  Detection oligonucleotide for L-MYC
ttttttagtgtgtaattt

SEQ ID NO: 1025 - DNA, 18 bp, Artificial Sequence
  Detection oligonucleotide for L-MYC
ggggttatcggggattga

SEQ ID NO: 1026 - DNA, 18 bp, Artificial Sequence
  Detection oligonucleotide for L-MYC
ggggttattggggattga

SEQ ID NO: 1027 - DNA, 18 bp, Artificial Sequence
  Detection oligonucleotide for L-MYC
ggtggggtcggttttatt

SEQ ID NO: 1028 - DNA, 18 bp, Artificial Sequence
  Detection oligonucleotide for L-MYC
ggtggggttggttttatt

SEQ ID NO: 1029 - DNA, 18 bp, Artificial Sequence
  Detection oligonucleotide for L-MYC
ggagagggcggggtttgt

SEQ ID NO: 1030 - DNA, 18 bp, Artificial Sequence
  Detection oligonucleotide for L-MYC
ggagagggtggggtttgt

SEQ ID NO: 1031 - DNA, 18 bp, Artificial Sequence
  Detection oligonucleotide for L-MYC
ttgagggtcgttaggtgg

SEQ ID NO: 1032 - DNA, 18 bp, Artificial Sequence
  Detection oligonucleotide for L-MYC
ttgagggttgttaggtgg

SEQ ID NO: 1033 - DNA, 18 bp, Artificial Sequence
  Detection oligonucleotide for C-ABL
attagagtcgggaggggc

SEQ ID NO: 1034 - DNA, 18 bp, Artificial Sequence
  Detection oligonucleotide for C-ABL
attagagttgggaggggc

SEQ ID NO: 1035 - DNA, 18 bp, Artificial Sequence
  Detection oligonucleotide for C-ABL
ggggtattcgggtttttt

SEQ ID NO: 1036 - DNA, 18 bp, Artificial Sequence
  Detection oligonucleotide for C-ABL
ggggtatttgggtttttt

SEQ ID NO: 1037 - DNA, 18 bp, Artificial Sequence
  Detection oligonucleotide for C-ABL
tttggtttcgttgtggag

SEQ ID NO: 1038 - DNA, 18 bp, Artificial Sequence
  Detection oligonucleotide for C-ABL
tttggttttgttgtggag

SEQ ID NO: 1039 - DNA, 18 bp, Artificial Sequence
  Detection oligonucleotide for C-ABL
ttgagtagcgttggagtc

SEQ ID NO: 1040 - DNA, 18 bp, Artificial Sequence
  Detection oligonucleotide for C-ABL
ttgagtagtgttggagtc

SEQ ID NO: 1041 - DNA, 18 bp, Artificial Sequence
  Detection oligonucleotide for C-ABL
gggttttgcggttgagga

SEQ ID NO: 1042 - DNA, 18 bp, Artificial Sequence
  Detection oligonucleotide for C-ABL
gggttttgtggttgagga

SEQ ID NO: 1043 - DNA, 18 bp, Artificial Sequence
  Detection oligonucleotide for C-ABL
agttttttcgttgtttac

SEQ ID NO: 1044 - DNA, 18 bp, Artificial Sequence
  Detection oligonucleotide for C-ABL
agtttttttgttgtttac

SEQ ID NO: 1045 - DNA, 18 bp, Artificial Sequence
  Detection oligonucleotide for C-ABL
gttgtttacggtttttat

SEQ ID NO: 1046 - DNA, 18 bp, Artificial Sequence
  Detection oligonucleotide for C-ABL
gttgtttatggtttttat

SEQ ID NO: 1047 - DNA, 18 bp, Artificial Sequence
  Detection oligonucleotide for C-ABL
tttgagggcggtggtggt

SEQ ID NO: 1048 - DNA, 18 bp, Artificial Sequence
  Detection oligonucleotide for C-ABL
tttgagggtggtggtggt

SEQ ID NO: 1049 - DNA, 18 bp, Artificial Sequence
  Detection oligonucleotide for C-ABL
gggtgtttcgggtagaga

SEQ ID NO: 1050 - DNA, 18 bp, Artificial Sequence
  Detection oligonucleotide for C-ABL
gggtgttttgggtagaga

SEQ ID NO: 1051 - DNA, 18 bp, Artificial Sequence
  Detection oligonucleotide for C-ABL
gagattttcgggtttggg

SEQ ID NO: 1052 - DNA, 18 bp, Artificial Sequence
  Detection oligonucleotide for C-ABL
gagatttttgggtttggg

SEQ ID NO: 1053 - DNA, 18 bp, Artificial Sequence
  Detection oligonucleotide for ELK1
tttgttttcgttgagtag

SEQ ID NO: 1054 - DNA, 18 bp, Artificial Sequence
  Detection oligonucleotide for ELK1
tttgtttttgttgagtag

SEQ ID NO: 1055 - DNA, 18 bp, Artificial Sequence
  Detection oligonucleotide for ELK1
ataggtttcgagtttttt

SEQ ID NO: 1056 - DNA, 18 bp, Artificial Sequence
  Detection oligonucleotide for ELK1
ataggttttgagtttttt

SEQ ID NO: 1057 - DNA, 18 bp, Artificial Sequence
  Detection oligonucleotide for ELK1
ttatagttcgttagtttt

SEQ ID NO: 1058 - DNA, 18 bp, Artificial Sequence
  Detection oligonucleotide for ELK1
ttatagtttgttagtttt

SEQ ID NO: 1059 - DNA, 18 bp, Artificial Sequence
  Detection oligonucleotide for ELK1
tggagtatcgtgaaggtc

SEQ ID NO: 1060 - DNA, 18 bp, Artificial Sequence
  Detection oligonucleotide for ELK1
tggagtattgtgaaggtc

SEQ ID NO: 1061 - DNA, 18 bp, Artificial Sequence
  Detection oligonucleotide for ELK1
tttttttacgttaattac

SEQ ID NO: 1062 - DNA, 18 bp, Artificial Sequence
  Detection oligonucleotide for ELK1
tttttttatgttaattac

SEQ ID NO: 1063 - DNA, 18 bp, Artificial Sequence
  Detection oligonucleotide for ELK1
gttaattacggtatagtt

SEQ ID NO: 1064 - DNA, 18 bp, Artificial Sequence
  Detection oligonucleotide for ELK1
gttaattatggtatagtt

SEQ ID NO: 1065 - DNA, 18 bp, Artificial Sequence
  Detection oligonucleotide for ELK1
gaagggttcgttttttaa

SEQ ID NO: 1066 - DNA, 18 bp, Artificial Sequence
  Detection oligonucleotide for ELK1
gaagggtttgttttttaa

SEQ ID NO: 1067 - DNA, 18 bp, Artificial Sequence
  Detection oligonucleotide for ELK1
taatttttcgaggttttg

SEQ ID NO: 1068 - DNA, 18 bp, Artificial Sequence
  Detection oligonucleotide for ELK1
taattttttgaggttttg

SEQ ID NO: 1069 - DNA, 18 bp, Artificial Sequence
  Detection oligonucleotide for ELK1
attaatagcgttttggtt

SEQ ID NO: 1070 - DNA, 18 bp, Artificial Sequence
  Detection oligonucleotide for ELK1
attaatagtgttttggtt

SEQ ID NO: 1071 - DNA, 18 bp, Artificial Sequence
  Detection oligonucleotide for ELK1
gtttagttcgatttattt

SEQ ID NO: 1072 - DNA, 18 bp, Artificial Sequence
  Detection oligonucleotide for ELK1
gtttagtttgatttattt

SEQ ID NO: 1073 - DNA, 18 bp, Artificial Sequence
  Detection oligonucleotide for ELK1
ggttgttacgtttatttt

SEQ ID NO: 1074 - DNA, 18 bp, Artificial Sequence
  Detection oligonucleotide for ELK1
ggttgttatgtttatttt

SEQ ID NO: 1075 - DNA, 18 bp, Artificial Sequence
  Detection oligonucleotide for Tubulin
taatcaaccgcaacctcc

SEQ ID NO: 1076 - DNA, 18 bp, Artificial Sequence
  Detection oligonucleotide for Tubulin
taatcaaccacaacctcc

SEQ ID NO: 1077 - DNA, 18 bp, Artificial Sequence
  Detection oligonucleotide for Tubulin
cttacccccgtcaatcaa

SEQ ID NO: 1078 - DNA, 18 bp, Artificial Sequence
  Detection oligonucleotide for Tubulin
cttacccccatcaatcaa

SEQ ID NO: 1079 - DNA, 18 bp, Artificial Sequence
  Detection oligonucleotide for Tubulin
gctaatctcgaaataaac

SEQ ID NO: 1080 - DNA, 18 bp, Artificial Sequence
  Detection oligonucleotide for Tubulin
gctaatctcaaaataaac

SEQ ID NO: 1081 - DNA, 18 bp, Artificial Sequence
  Detection oligonucleotide for CSF1
ttatagagcgttagtatt

SEQ ID NO: 1082 - DNA, 18 bp, Artificial Sequence
  Detection oligonucleotide for CSF1
ttatagagtgttagtatt

SEQ ID NO: 1083 - DNA, 18 bp, Artificial Sequence
  Detection oligonucleotide for CSF1
aagtgtagcgtagaagat

SEQ ID NO: 1084 - DNA, 18 bp, Artificial Sequence
  Detection oligonucleotide for CSF1
aagtgtagtgtagaagat

SEQ ID NO: 1085 - DNA, 18 bp, Artificial Sequence
  Detection oligonucleotide for CSF1
aggggaggcgggggaagg

SEQ ID NO: 1086 - DNA, 18 bp, Artificial Sequence
  Detection oligonucleotide for CSF1
aggggaggtgggggaagg

SEQ ID NO: 1087 - DNA, 18 bp, Artificial Sequence
  Detection oligonucleotide for CSF1
ggggaaggcggttgagtg

SEQ ID NO: 1088 - DNA, 18 bp, Artificial Sequence
  Detection oligonucleotide for CSF1
ggggaaggtggttgagtg

SEQ ID NO: 1089 - DNA, 18 bp, Artificial Sequence
  Detection oligonucleotide for CSF1
gtgtttggcgtttggtta

SEQ ID NO: 1090 - DNA, 18 bp, Artificial Sequence
  Detection oligonucleotide for CSF1
gtgtttggtgtttggtta

SEQ ID NO: 1091 - DNA, 18 bp, Artificial Sequence
  Detection oligonucleotide for CD1R3
taactatacgaactacaa

SEQ ID NO: 1092 - DNA, 18 bp, Artificial Sequence
  Detection oligonucleotide for CD1R3
taactatacaaactacaa

SEQ ID NO: 1093 - DNA, 18 bp, Artificial Sequence
  Detection oligonucleotide for CD1R3
accctcctcgctaaactt

SEQ ID NO: 1094 - DNA, 18 bp, Artificial Sequence
  Detection oligonucleotide for CD1R3
accctcctcactaaactt

SEQ ID NO: 1095 - DNA, 18 bp, Artificial Sequence
  Detection oligonucleotide for CD1R3
ccaaaccccgacaaccct

SEQ ID NO: 1096 - DNA, 18 bp, Artificial Sequence
  Detection oligonucleotide for CD1R3
ccaaaccccaacaaccct

SEQ ID NO: 1097 - DNA, 18 bp, Artificial Sequence
  Detection oligonucleotide for CD1R3
tccctttccgctaaatac

SEQ ID NO: 1098 - DNA, 18 bp, Artificial Sequence
  Detection oligonucleotide for CD1R3
tccctttccactaaatac

SEQ ID NO: 1099 - DNA, 18 bp, Artificial Sequence
  Detection oligonucleotide for CD1R3
tcaactcacgtccctttc

SEQ ID NO: 1100 - DNA, 18 bp, Artificial Sequence
  Detection oligonucleotide for CD1R3
tcaactcacatccctttc

SEQ ID NO: 1101 - DNA, 18 bp, Artificial Sequence
  Detection oligonucleotide for CSNK2B
gattgattcgtattaggg

SEQ ID NO: 1102 - DNA, 18 bp, Artificial Sequence
  Detection oligonucleotide for CSNK2B
gattgatttgtattaggg

SEQ ID NO: 1103 - DNA, 18 bp, Artificial Sequence
  Detection oligonucleotide for CSNK2B
ccctaatacgaatcaatc

SEQ ID NO: 1104 - DNA, 18 bp, Artificial Sequence
  Detection oligonucleotide for CSNK2B
ccctaatacaaatcaatc

SEQ ID NO: 1105 - DNA, 18 bp, Artificial Sequence
  Detection oligonucleotide for CSNK2B
ggatttagcggattggtc

SEQ ID NO: 1106 - DNA, 18 bp, Artificial Sequence
  Detection oligonucleotide for CSNK2B
ggatttagtggattggtc

SEQ ID NO: 1107 - DNA, 18 bp, Artificial Sequence
  Detection oligonucleotide for CSNK2B
gaccaatccgctaaatcc

SEQ ID NO: 1108 - DNA, 18 bp, Artificial Sequence
  Detection oligonucleotide for CSNK2B
gaccaatccactaaatcc

SEQ ID NO: 1109 - DNA, 18 bp, Artificial Sequence
  Detection oligonucleotide for CSNK2B
ggattggtcgaggatagg

SEQ ID NO: 1110 - DNA, 18 bp, Artificial Sequence
  Detection oligonucleotide for CSNK2B
ggattggttgaggatagg

SEQ ID NO: 1111 - DNA, 18 bp, Artificial Sequence
  Detection oligonucleotide for CSNK2B
cctatcctcgaccaatcc

SEQ ID NO: 1112 - DNA, 18 bp, Artificial Sequence
  Detection oligonucleotide for CSNK2B
cctatcctcaaccaatcc

SEQ ID NO: 1113 - DNA, 18 bp, Artificial Sequence
  Detection oligonucleotide for CSNK2B
gaggggaacgtgaggaga

SEQ ID NO: 1114 - DNA, 18 bp, Artificial Sequence
  Detection oligonucleotide for CSNK2B
gaggggaatgtgaggaga

SEQ ID NO: 1115 - DNA, 18 bp, Artificial Sequence
  Detection oligonucleotide for CSNK2B
tctcctcacgttcccctc

SEQ ID NO: 1116 - DNA, 18 bp, Artificial Sequence
  Detection oligonucleotide for CSNK2B
tctcctcacattcccctc

SEQ ID NO: 1117 - DNA, 18 bp, Artificial Sequence
  Detection oligonucleotide for CSNK2B
taggttagcgtattggga

SEQ ID NO: 1118 - DNA, 18 bp, Artificial Sequence
  Detection oligonucleotide for CSNK2B
taggttagtgtattggga

SEQ ID NO: 1119 - DNA, 18 bp, Artificial Sequence
  Detection oligonucleotide for CSNK2B
tcccaatacgctaaccta

SEQ ID NO: 1120 - DNA, 18 bp, Artificial Sequence
  Detection oligonucleotide for CSNK2B
tcccaatacactaaccta

SEQ ID NO: 1121 - DNA, 18 bp, Artificial Sequence
  Detection oligonucleotide for CSNK2B
tattgggacgttttagtt

SEQ ID NO: 1122 - DNA, 18 bp, Artificial Sequence
  Detection oligonucleotide for CSNK2B
tattgggatgttttagtt

SEQ ID NO: 1123 - DNA, 18 bp, Artificial Sequence
  Detection oligonucleotide for CSNK2B
aactaaaacgtcccaata

SEQ ID NO: 1124 - DNA, 18 bp, Artificial Sequence
  Detection oligonucleotide for CSNK2B
aactaaaacatcccaata

SEQ ID NO: 1125 - DNA, 18 bp, Artificial Sequence
  Detection oligonucleotide for Me491/TD63
ttgttattcggttttagt

SEQ ID NO: 1126 - DNA, 18 bp, Artificial Sequence
  Detection oligonucleotide for Me491/TD63
ttgttatttggttttagt

SEQ ID NO: 1127 - DNA, 18 bp, Artificial Sequence
  Detection oligonucleotide for Me491/TD63
agttggtacggaggtata

SEQ ID NO: 1128 - DNA, 18 bp, Artificial Sequence
  Detection oligonucleotide for Me491/TD63
agttggtatggaggtata

SEQ ID NO: 1129 - DNA, 18 bp, Artificial Sequence
  Detection oligonucleotide for Me491/TD63
aggtatagcgttagaggg

SEQ ID NO: 1130 - DNA, 18 bp, Artificial Sequence
  Detection oligonucleotide for Me491/TD63
aggtatagtgttagaggg

SEQ ID NO: 1131 - DNA, 18 bp, Artificial Sequence
  Detection oligonucleotide for Me491/TD63
aggggttacgtggttttg

SEQ ID NO: 1132 - DNA, 18 bp, Artificial Sequence
  Detection oligonucleotide for Me491/TD63
aggggttatgtggttttg

SEQ ID NO: 1133 - DNA, 18 bp, Artificial Sequence
  Detection oligonucleotide for Me491/TD63
tgtatagtcggatgggga

SEQ ID NO: 1134 - DNA, 18 bp, Artificial Sequence
  Detection oligonucleotide for Me491/TD63
tgtatagttggatgggga

SEQ ID NO: 1135 - DNA, 18 bp, Artificial Sequence
  Detection oligonucleotide for AR
acctctctcgaaataaca

SEQ ID NO: 1136 - DNA, 18 bp, Artificial Sequence
  Detection oligonucleotide for AR
acctctctcaaaataaca

SEQ ID NO: 1137 - DNA, 18 bp, Artificial Sequence
  Detection oligonucleotide for AR
ctctaaaacgcaacctct

SEQ ID NO: 1138 - DNA, 18 bp, Artificial Sequence
  Detection oligonucleotide for AR
ctctaaaacacaacctct

SEQ ID NO: 1139 - DNA, 18 bp, Artificial Sequence
  Detection oligonucleotide for AR
aactactacgacaacccc

SEQ ID NO: 1140 - DNA, 18 bp, Artificial Sequence
  Detection oligonucleotide for AR
aactactacaacaacccc

SEQ ID NO: 1141 - DNA, 18 bp, Artificial Sequence
  Detection oligonucleotide for AR
actaacctcgctcaaaat

SEQ ID NO: 1142 - DNA, 18 bp, Artificial Sequence
  Detection oligonucleotide for AR
actaacctcactcaaaat

SEQ ID NO: 1143 - DNA, 18 bp, Artificial Sequence
  Detection oligonucleotide for CDK 4
tatggggtcgtaggaatc

SEQ ID NO: 1144 - DNA, 18 bp, Artificial Sequence
  Detection oligonucleotide for CDK 4
tatggggttgtaggaatc

SEQ ID NO: 1145 - DNA, 18 bp, Artificial Sequence
  Detection oligonucleotide for CDK 4
gattcctacgaccccata

SEQ ID NO: 1146 - DNA, 18 bp, Artificial Sequence
  Detection oligonucleotide for CDK 4
gattcctacaaccccata

SEQ ID NO: 1147 - DNA, 18 bp, Artificial Sequence
  Detection oligonucleotide for CDK 4
ggaagggtcgtttaaggg

SEQ ID NO: 1148 - DNA, 18 bp, Artificial Sequence
  Detection oligonucleotide for CDK 4
ggaagggttgtttaaggg

SEQ ID NO: 1149 - DNA, 18 bp, Artificial Sequence
  Detection oligonucleotide for CDK 4
cccttaaacgacccttcc

SEQ ID NO: 1150 - DNA, 18 bp, Artificial Sequence
  Detection oligonucleotide for CDK 4
cccttaaacaacccttcc

SEQ ID NO: 1151 - DNA, 18 bp, Artificial Sequence
  Detection oligonucleotide for CDK 4
aggattttcgatgtaagg

SEQ ID NO: 1152 - DNA, 18 bp, Artificial Sequence
  Detection oligonucleotide for CDK 4
aggatttttgatgtaagg

SEQ ID NO: 1153 - DNA, 18 bp, Artificial Sequence
  Detection oligonucleotide for CDK 4
ccttacatcgaaaatcct

SEQ ID NO: 1154 - DNA, 18 bp, Artificial Sequence
  Detection oligonucleotide for CDK 4
ccttacatcaaaaatcct

SEQ ID NO: 1155 - DNA, 18 bp, Artificial Sequence
  Detection oligonucleotide for Humos
ccttactacgttaaactc

SEQ ID NO: 1156 - DNA, 18 bp, Artificial Sequence
  Detection oligonucleotide for Humos
ccttactacattaaactc

SEQ ID NO: 1157 - DNA, 18 bp, Artificial Sequence
  Detection oligonucleotide for Humos
ctccaatacgacaataaa

SEQ ID NO: 1158 - DNA, 18 bp, Artificial Sequence
  Detection oligonucleotide for Humos
ctccaatacaacaataaa

SEQ ID NO: 1159 - DNA, 18 bp, Artificial Sequence
  Detection oligonucleotide for CDC25A
gtgtaggtcggtttggtt

SEQ ID NO: 1160 - DNA, 18 bp, Artificial Sequence
  Detection oligonucleotide for CDC25A
gtgtaggttggtttggtt

SEQ ID NO: 1161 - DNA, 18 bp, Artificial Sequence
  Detection oligonucleotide for CDC25A
aaccaaaccgacctacac

SEQ ID NO: 1162 - DNA, 18 bp, Artificial Sequence
  Detection oligonucleotide for CDC25A
aaccaaaccaacctacac

SEQ ID NO: 1163 - DNA, 18 bp, Artificial Sequence
  Detection oligonucleotide for CDC25A
ttgttattcggagttggg

SEQ ID NO: 1164 - DNA, 18 bp, Artificial Sequence
  Detection oligonucleotide for CDC25A
ttgttatttggagttggg

SEQ ID NO: 1165 - DNA, 18 bp, Artificial Sequence
  Detection oligonucleotide for CDC25A
cccaactccgaataacaa

SEQ ID NO: 1166 - DNA, 18 bp, Artificial Sequence
  Detection oligonucleotide for CDC25A
cccaactccaaataacaa

SEQ ID NO: 1167 - DNA, 18 bp, Artificial Sequence
  Detection oligonucleotide for CDC25A
tgggtaagcgggtgggag

SEQ ID NO: 1168 - DNA, 18 bp, Artificial Sequence
  Detection oligonucleotide for CDC25A
tgggtaagtgggtgggag

SEQ ID NO: 1169 - DNA, 18 bp, Artificial Sequence
  Detection oligonucleotide for CDC25A
ctcccacccgcttaccca

SEQ ID NO: 1170 - DNA, 18 bp, Artificial Sequence
  Detection oligonucleotide for CDC25A
ctcccacccacttaccca

SEQ ID NO: 1171 - DNA, 18 bp, Artificial Sequence
  Detection oligonucleotide for CDC25A
gagaatagcgaagatagc

SEQ ID NO: 1172 - DNA, 18 bp, Artificial Sequence
  Detection oligonucleotide for CDC25A
gagaatagtgaagatagc

SEQ ID NO: 1173 - DNA, 18 bp, Artificial Sequence
  Detection oligonucleotide for CDC25A
gctatcttcgctattctc

SEQ ID NO: 1174 - DNA, 18 bp, Artificial Sequence
  Detection oligonucleotide for CDC25A
gctatcttcactattctc

SEQ ID NO: 1175 - DNA, 18 bp, Artificial Sequence
  Detection oligonucleotide for CDC25A
tattgagtcgttattatc

SEQ ID NO: 1176 - DNA, 18 bp, Artificial Sequence
  Detection oligonucleotide for CDC25A
tattgagttgttattatc

SEQ ID NO: 1177 - DNA, 18 bp, Artificial Sequence
  Detection oligonucleotide for CDC25A
gataataacgactcaata

SEQ ID NO: 1178 - DNA, 18 bp, Artificial Sequence
  Detection oligonucleotide for CDC25A
gataataacaactcaata

SEQ ID NO: 1179 - DNA, 18 bp, Artificial Sequence
  Detection oligonucleotide for CMYCex3
gaagaaatcgatgttgtt

SEQ ID NO: 1180 - DNA, 18 bp, Artificial Sequence
  Detection oligonucleotide for CMYCex3
gaagaaattgatgttgtt

SEQ ID NO: 1181 - DNA, 18 bp, Artificial Sequence
  Detection oligonucleotide for CMYCex3
aggtgttacgtttttata

SEQ ID NO: 1182 - DNA, 18 bp, Artificial Sequence
  Detection oligonucleotide for CMYCex3
aggtgttatgtttttata

SEQ ID NO: 1183 - DNA, 18 bp, Artificial Sequence
  Detection oligonucleotide for CMYCex3
tttttattcggaaggatt

SEQ ID NO: 1184 - DNA, 18 bp, Artificial Sequence
  Detection oligonucleotide for CMYCex3
tttttatttggaaggatt

SEQ ID NO: 1185 - DNA, 18 bp, Artificial Sequence
  Detection oligonucleotide for CMYCex3
gtaataatcgaaaatgta

SEQ ID NO: 1186 - DNA, 18 bp, Artificial Sequence
  Detection oligonucleotide for CMYCex3
gtaataattgaaaatgta

SEQ ID NO: 1187 - DNA, 18 bp, Artificial Sequence
  Detection oligonucleotide for CMYCex3
ttaagaggcgaatatata

SEQ ID NO: 1188 - DNA, 18 bp, Artificial Sequence
  Detection oligonucleotide for CMYCex3
ttaagaggtgaatatata

SEQ ID NO: 1189 - DNA, 18 bp, Artificial Sequence
  Detection oligonucleotide for CMYCex3
atatataacgttttggag

SEQ ID NO: 1190 - DNA, 18 bp, Artificial Sequence
  Detection oligonucleotide for CMYCex3
atatataatgttttggag

SEQ ID NO: 1191 - DNA, 18 bp, Artificial Sequence
  Detection oligonucleotide for CMYCex3
ttttggagcgttagagga

SEQ ID NO: 1192 - DNA, 18 bp, Artificial Sequence
  Detection oligonucleotide for CMYCex3
ttttggagtgttagagga

SEQ ID NO: 1193 - DNA, 18 bp, Artificial Sequence
  Detection oligonucleotide for CMYCex3
aggaggaacgagttaaaa

SEQ ID NO: 1194 - DNA, 18 bp, Artificial Sequence
  Detection oligonucleotide for CMYCex3
aggaggaatgagttaaaa

SEQ ID NO: 1195 - DNA, 18 bp, Artificial Sequence
  Detection oligonucleotide for CMYCex3
agttaaaacggagttttt

SEQ ID NO: 1196 - DNA, 18 bp, Artificial Sequence
  Detection oligonucleotide for CMYCex3
agttaaaatggagttttt

SEQ ID NO: 1197 - DNA, 18 bp, Artificial Sequence
  Detection oligonucleotide for CMYCex3
ttgttttgcgtgattaga

SEQ ID NO: 1198 - DNA, 18 bp, Artificial Sequence
  Detection oligonucleotide for CMYCex3
ttgttttgtgtgattaga

SEQ ID NO: 1199 - DNA, 18 bp, Artificial Sequence
  Detection oligonucleotide for CMYCex3
ttagatttcggagttgga

SEQ ID NO: 1200 - DNA, 18 bp, Artificial Sequence
  Detection oligonucleotide for CMYCex3
ttagattttggagttgga

SEQ ID NO: 1201 - DNA, 18 bp, Artificial Sequence
  Detection oligonucleotide for CMYCex3
attttgttcgtttaagta

SEQ ID NO: 1202 - DNA, 18 bp, Artificial Sequence
  Detection oligonucleotide for CMYCex3
attttgtttgtttaagta

SEQ ID NO: 1203 - DNA, 18 bp, Artificial Sequence
  Detection oligonucleotide for CMYCex3
aatagttacggaattttt

SEQ ID NO: 1204 - DNA, 18 bp, Artificial Sequence
  Detection oligonucleotide for CMYCex3
aatagttatggaattttt

SEQ ID NO: 1205 - DNA, 18 bp, Artificial Sequence
  Detection oligonucleotide for CMYCex3
tttttgtgcgtaaggaaa

SEQ ID NO: 1206 - DNA, 18 bp, Artificial Sequence
  Detection oligonucleotide for CMYCex3
tttttgtgtgtaaggaaa

SEQ ID NO: 1207 - DNA, 18 bp, Artificial Sequence
  Detection oligonucleotide for CMYCex3
aaggaaaacgattttttt

SEQ ID NO: 1208 - DNA, 18 bp, Artificial Sequence
  Detection oligonucleotide for CMYCex3
aaggaaaatgattttttt

SEQ ID NO: 1209 - DNA, 18 bp, Artificial Sequence
  Detection oligonucleotide for CMYCex3
tgagtaatcgtttatgaa

SEQ ID NO: 1210 - DNA, 18 bp, Artificial Sequence
  Detection oligonucleotide for CMYCex3
tgagtaattgtttatgaa

SEQ ID NO: 1211 - DNA, 18 bp, Artificial Sequence
  Detection oligonucleotide for N33
ttggttcgggaaaggtaa

SEQ ID NO: 1212 - DNA, 18 bp, Artificial Sequence
  Detection oligonucleotide for N33
ttggtttgggaaaggtaa

SEQ ID NO: 1213 - DNA, 18 bp, Artificial Sequence
  Detection oligonucleotide for EGR4
ggtgggaagcgtatttat

SEQ ID NO: 1214 - DNA, 18 bp, Artificial Sequence
  Detection oligonucleotide for EGR4
ggtgggaagtgtatttat

SEQ ID NO: 1215 - DNA, 18 bp, Artificial Sequence
  Detection oligonucleotide for N33
atttagttcgggggagga

SEQ ID NO: 1216 - DNA, 18 bp, Artificial Sequence
  Detection oligonucleotide for N33
atttagtttgggggagga

SEQ ID NO: 1217 - DNA, 18 bp, Artificial Sequence
  Detection oligonucleotide for N33
tgttatttcggagggttt

SEQ ID NO: 1218 - DNA, 18 bp, Artificial Sequence
  Detection oligonucleotide for N33
tgttattttggagggttt

SEQ ID NO: 1219 - DNA, 18 bp, Artificial Sequence
  Detection oligonucleotide for N33
gtttagttagcgggtttt

SEQ ID NO: 1220 - DNA, 18 bp, Artificial Sequence
  Detection oligonucleotide for N33
gtttagttagtgggtttt

SEQ ID NO: 1221 - DNA, 18 bp, Artificial Sequence
  Detection oligonucleotide for Humos
gagtttaacgtagtaagg

SEQ ID NO: 1222 - DNA, 18 bp, Artificial Sequence
  Detection oligonucleotide for Humos
gagtttaatgtagtaagg

SEQ ID NO: 1223 - DNA, 18 bp, Artificial Sequence
  Detection oligonucleotide for SDC4
ttttatatcgggtgtgtt

SEQ ID NO: 1224 - DNA, 18 bp, Artificial Sequence
  Detection oligonucleotide for SDC4
ttttatattgggtgtgtt

SEQ ID NO: 1225 - DNA, 18 bp, Artificial Sequence
  Detection oligonucleotide for EGR4
ttatagttcgagtttttt

SEQ ID NO: 1226 - DNA, 18 bp, Artificial Sequence
  Detection oligonucleotide for EGR4
ttatagtttgagtttttt

SEQ ID NO: 1227 - DNA, 18 bp, Artificial Sequence
  Detection oligonucleotide for MPL
tgtagtgagtcgagatta

SEQ ID NO: 1228 - DNA, 18 bp, Artificial Sequence
  Detection oligonucleotide for MPL
tgtagtgagttgagatta

SEQ ID NO: 1229 - DNA, 18 bp, Artificial Sequence
  Detection oligonucleotide for TP73
tttggtgcgcgtagagaa

SEQ ID NO: 1230 - DNA, 18 bp, Artificial Sequence
  Detection oligonucleotide for TP73
tttggtgtgtgtagagaa

SEQ ID NO: 1231 - DNA, 18 bp, Artificial Sequence
  Detection oligonucleotide for CDK 4
gggttttacgtggttgga

SEQ ID NO: 1232 - DNA, 18 bp, Artificial Sequence
  Detection oligonucleotide for CDK 4
gggttttatgtggttgga

SEQ ID NO: 1233 - DNA, 18 bp, Artificial Sequence
  Detection oligonucleotide for CDK 4
tccaaccacgtaaaaccc

SEQ ID NO: 1234 - DNA, 18 bp, Artificial Sequence
  Detection oligonucleotide for CDK 4
tccaaccacataaaaccc

SEQ ID NO: 1235 - DNA, 18 bp, Artificial Sequence
  Detection oligonucleotide for CSNK2B
aggagtttcggaggaaat

SEQ ID NO: 1236 - DNA, 18 bp, Artificial Sequence
  Detection oligonucleotide for CSNK2B
aggagttttggaggaaat

SEQ ID NO: 1237 - DNA, 18 bp, Artificial Sequence
  Detection oligonucleotide for CSNK2B
atttcctccgaaactcct

SEQ ID NO: 1238 - DNA, 18 bp, Artificial Sequence
  Detection oligonucleotide for CSNK2B
atttcctccaaaactcct

SEQ ID NO: 1239 - DNA, 18 bp, Artificial Sequence
  Detection oligonucleotide for Tubulin
tacttcaacgtcctaata

SEQ ID NO: 1240 - DNA, 18 bp, Artificial Sequence
  Detection oligonucleotide for Tubulin
tacttcaacatcctaata

SEQ ID NO: 1241 - DNA, 18 bp, Artificial Sequence
  Detection oligonucleotide for ELK1
tttattttcgtttttggg

SEQ ID NO: 1242 - DNA, 18 bp, Artificial Sequence
  Detection oligonucleotide for ELK1
tttatttttgtttttggg

SEQ ID NO: 1243 - DNA, 18 bp, Artificial Sequence
  Detection oligonucleotide for Tubulin
caatactccgtccattaa

SEQ ID NO: 1244 - DNA, 18 bp, Artificial Sequence
  Detection oligonucleotide for Tubulin
caatactccatccattaa

SEQ ID NO: 1245 - DNA, 18 bp, Artificial Sequence
  Detection oligonucleotide for Humos
gttaccaccgaactccat

SEQ ID NO: 1246 - DNA, 18 bp, Artificial Sequence
  Detection oligonucleotide for Humos
gttaccaccaaactccat

SEQ ID NO: 1247 - DNA, 18 bp, Artificial Sequence
  Detection oligonucleotide for CDK 4
tttaagggcgggaagtgg

SEQ ID NO: 1248 - DNA, 18 bp, Artificial Sequence
  Detection oligonucleotide for CDK 4
tttaagggtgggaagtgg

SEQ ID NO: 1249 - DNA, 18 bp, Artificial Sequence
  Detection oligonucleotide for CDK 4
ccacttcccgcccttaaa

SEQ ID NO: 1250 - DNA, 18 bp, Artificial Sequence
  Detection oligonucleotide for CDK 4
ccacttcccacccttaaa

SEQ ID NO: 1251 - DNA, 18 bp, Artificial Sequence
  Detection oligonucleotide for Humos
aaacaaaccgttcacaac

SEQ ID NO: 1252 - DNA, 18 bp, Artificial Sequence
  Detection oligonucleotide for Humos
aaacaaaccattcacaac

SEQ ID NO: 1253 - DNA, 18 bp, Artificial Sequence
  Detection oligonucleotide for Humos
ctcccctacgtccccctc

SEQ ID NO: 1254 - DNA, 18 bp, Artificial Sequence
  Detection oligonucleotide for Humos
ctcccctacatccccctc

SEQ ID NO: 1255 - DNA, 18 bp, Artificial Sequence
  Detection oligonucleotide for AR
gtagtattcgaaggtagt

SEQ ID NO: 1256 - DNA, 18 bp, Artificial Sequence
  Detection oligonucleotide for AR
gtagtatttgaaggtagt

SEQ ID NO: 1257 - DNA, 18 bp, Artificial Sequence
  Detection oligonucleotide for AR
actaccttcgaatactac

SEQ ID NO: 1258 - DNA, 18 bp, Artificial Sequence
  Detection oligonucleotide for AR
actaccttcaaatactac
